(19) United States
(12) Patent Application Publication
(10) Pub. No.: US 2020/0347386 A1
(43) Pub. Date: Nov. 5, 2020

(54) COMBINATION GENE TARGETS FOR IMPROVED IMMUNOTHERAPY

(71) Applicant: KSQ Therapeutics, Inc., Cambridge, MA (US)

(72) Inventors: Micah BENSON, Cambridge, MA (US); Michael SCHLABACH, Cambridge, MA (US); Gregory KRYUKOV, Cambridge, MA (US); Anne Louise CADZOW, Cambridge, MA (US); Isabelle Fleur LE MERCIER, Cambridge, MA (US); Frank STEGMEIER, Cambridge, MA (US)

(21) Appl. No.: 16/781,732

(22) Filed: Feb. 4, 2020

Related U.S. Application Data
(60) Provisional application No. 62/818,677, filed on Mar. 14, 2019.
(60) Provisional application No. 62/800,999, filed on Feb. 4, 2019.

(51) Int. Cl. C12N 15/11; C12N 9/22; C12N 15/86; A61K 35/17; A61K 49/00; C12N 5/0783

(52) U.S. Cl. CPC C12N 15/11; C12N 9/22; C12N 15/86; A61K 35/17; A61K 49/0004; C12N 2510/00; C12N 2310/14; C12N 2310/531; C12N 2800/80; C12N 2310/20; C12N 2740/15043; C12N 5/0636

(57) ABSTRACT

The present disclosure provides methods and compositions related to the modification of immune effector cells to increase therapeutic efficacy. In some embodiments, immune effector cells modified to reduce expression of one or more endogenous target genes, or to reduce one or more functions of an endogenous protein to enhance effector functions of the immune cells are provided. In some embodiments, immune effector cells further modified by introduction of transgenes conferring antigen specificity, such as exogenous T cell receptors (TCRs) or chimeric antigen receptors (CARs) are provided. Methods of treating a cell proliferative disorder, such as a cancer, using the modified immune effector cells described herein are also provided.

### CROSS-REFERENCE TO RELATED APPLICATIONS

[0001] This application claims priority to U.S. Provisional Patent Application No. 62/800,999, filed on Feb. 4, 2019; and U.S. Provisional Patent Application No. 62/818,677, filed on Mar. 14, 2019, both of which are incorporated herein by reference in their entireties.

### DESCRIPTION OF THE TEXT FILE SUBMITTED ELECTRONICALLY

[0002] The contents of the text file submitted electronically herewith are incorporated herein by reference in their entirety: A computer readable format copy of the Sequence Listing (filename: 700061_KSQW-014_ST25.txt; date recorded: Feb. 4, 2020; file size: 945 kilobytes).

### FIELD

[0003] The disclosure relates to methods, compositions, and components for editing a target nucleic acid sequence, or modulating expression of a target nucleic acid sequence, and applications thereof in connection with immunotherapy, including use with receptor-engineered immune effector cells, in the treatment of cell proliferative diseases, inflammatory diseases, and/or infectious diseases.

### BACKGROUND

[0004] Adoptive cell transfer utilizing genetically modified T cells, in particular CAR-T cells, has entered clinical testing as a therapeutic for solid and hematologic malignancies. Results to date have been mixed. In hematologic malignancies (especially lymphoma, CLL and ALL), the majority of patients in several Phase 1 and 2 trials exhibited at least a partial response, with some exhibiting complete responses (Kochenderfer et al., 2012 Blood 1 19, 2709-2720). In 2017, the FDA approved two CAR-T therapies, Kymriah™ and Yescarta™, both for the treatment of hematological cancers. However, in most tumor types (including melanoma, renal cell carcinoma and colorectal cancer), fewer responses have been observed (Johnson et al., 2009 Blood 1 14, 535-546; Lamers et al., 2013 Mol. Ther. 21, 904-912; Warren et al., 1998 Cancer Gene Ther. 5, S1-S2). As such, there is considerable room for improvement with adoptive T cell therapies, as success has largely been limited to CAR-T cells approaches targeting hematological malignancies of the B cell lineage.

### SUMMARY

[0005] There exists a need to improve the efficacy of adoptive transfer of modified immune cells in cancer treatment, in particular increasing the efficacy of adoptive cell therapies against solid malignancies, as reduced responses have been observed in these tumor types (melanoma, renal cell carcinoma and colorectal cancer; Yong, 2017, Imm Cell Biol., 95:356-363). In addition, even in hematological malignancies where a benefit of adoptive transfer has been observed, not all patients respond and relapses occur with a greater than desired frequency, likely as a result of diminished function of the adoptively transferred T cells.

[0006] Factors limiting the efficacy of genetically modified immune cells as cancer therapeutics include: (1) cell proliferation, e.g., limited proliferation of T cells following adoptive transfer; (2) cell survival, e.g., induction of T cell apoptosis by factors in the tumor environment; and (3) cell function, e.g., inhibition of cytotoxic T cell function by inhibitory factors secreted by host immune cells and cancer cells and exhaustion of immune cells during manufacturing processes and/or after transfer.

[0007] Particular features thought to increase the anti-tumor effects of an immune cell include a cell's ability to: 1) proliferate in the host following adoptive transfer; 2) infiltrate a tumor; 3) persist in the host and/or exhibit resistance to immune cell exhaustion; and 4) function in a manner capable of killing tumor cells. The present disclosure provides immune cells comprising decreased expression and/or function of one or more endogenous target genes wherein the modified immune cells demonstrate an enhancement of one or more effector functions including increased proliferation, increased infiltration into tumors, persistence of the immune cells in a subject, and/or increased resistance to immune cell exhaustion. The present disclosure also provides methods and compositions for modification of immune effector cells to elicit enhanced immune cell activity towards a tumor cell, as well as methods and compositions suitable for use in the context of adoptive immune cell transfer therapy.

[0008] In some embodiments, the present disclosure provides a modified immune effector cell comprising a gene-regulating system capable of reducing the expression and/or function of at least two endogenous target genes selected from SOCS1, PTPN2, and ZC3H12A, wherein the reduced expression and/or function of the at least two endogenous target genes enhances an effector function of the immune effector cell. In some embodiments, the at least two target genes are SOCS1 and PTPN2. In some embodiments, the at least two target genes are SOCS1 and ZC3H12A. In some embodiments, the at least two target genes are PTPN2 and ZC3H12A. In some embodiments, the gene regulating system is further capable of reducing the expression and/or function of CBLB.

[0009] In some embodiments, the gene-regulating system comprises (i) a nucleic acid molecule; (ii) an enzymatic protein; or (iii) a nucleic acid molecule and an enzymatic protein. In some embodiments, the gene-regulating system comprises a nucleic acid molecule selected from an siRNA, an shRNA, a microRNA (miR), an antagomiR, or an antisense RNA. In some embodiments, the gene-regulating system comprises an enzymatic protein, and wherein the enzymatic protein has been engineered to specifically bind to a target sequence in one or more of the endogenous genes. In some embodiments, the protein is a Transcription activator-like effector nuclease (TALEN), a zinc-finger nuclease, or a meganuclease. In some embodiments, the gene-regulating system comprises a nucleic acid molecule and an enzymatic protein, wherein the nucleic acid molecule is a guide RNA (gRNA) molecule and the enzymatic protein is a Cas protein or Cas ortholog. In some embodiments, the Cas protein is a Cas9 protein. In some embodiments, the Cas protein is a wild-type Cas protein comprising two enzymatically active domains, and capable of inducing double stranded DNA breaks. In some embodiments, the Cas protein is a Cas nickase mutant comprising one enzymatically active domain and capable of inducing single stranded DNA breaks. In some embodiments, the Cas protein is a deactivated Cas protein (dCas) and is associated with a heterologous protein capable of modulating the expression of the one or more endogenous target genes. In some embodiments, the heterologous protein is selected from the group consisting of MAX-interacting protein 1 (MXI1), Krüppel-associated box (KRAB) domain, methyl-CpG binding protein 2 (MECP2), and four concatenated mSin3 domains (SID4X).

[0010] In some embodiments, the at least two endogenous genes are SOCS1 and PTPN2, and wherein the gene-regulating system comprises at least one SOCS1-targeting gRNA molecule comprising a targeting domain sequence complementary to a nucleic acid sequence defined by any one of the set of genome coordinates shown in Tables 3 and 4 and at least one PTPN2-targeting gRNA molecule comprising a targeting domain sequence complementary to a nucleic acid sequence defined by any one of the set of genome coordinates shown in Tables 5 and 6. In some embodiments, the at least two endogenous genes are SOCS1 and PTPN2, and wherein the gene-regulating system comprises at least one SOCS1-targeting gRNA molecule comprising a targeting domain sequence that binds to a nucleic acid sequence defined by any one of the set of genome coordinates shown in Tables 3 and 4 and at least one PTPN2-targeting gRNA molecule comprising a targeting domain sequence that binds to a nucleic acid sequence defined by any one of the set of genome coordinates shown in Tables 5 and 6. In some embodiments, the at least two endogenous genes are SOCS1 and PTPN2, and wherein the gene-regulating system comprises at least one SOCS1-targeting gRNA molecule comprising a targeting domain sequence that binds to a target DNA sequence selected from the group consisting of SEQ ID NOs: 7-151 and at least one PTPN2-targeting gRNA molecule comprising a targeting domain sequence that binds to a target DNA sequence selected from the group consisting of SEQ ID NOs: 185-207. In some embodiments, the at least two endogenous genes are SOCS1 and PTPN2, and wherein the gene-regulating system comprises at least one SOCS1-targeting gRNA molecule comprising a targeting domain sequence encoded by a nucleic acid sequence selected from the group consisting of SEQ ID NOs: 7-151 and at least one PTPN2-targeting gRNA molecule comprising a targeting domain sequence encoded by a nucleic acid sequence selected from the group consisting of SEQ ID NOs: 185-207.

[0011] In some embodiments, the at least two endogenous genes are SOCS1 and ZC3H12A, and wherein the gene-regulating system comprises at least one SOCS1-targeting gRNA molecule comprising a targeting domain sequence complementary to a nucleic acid sequence defined by any one of the set of genome coordinates shown in Tables 3 and 4, and at least one ZC3H12A-targeting gRNA molecule comprising a targeting domain sequence complementary to a nucleic acid sequence defined by any one of the set of genome coordinates shown in Tables 7 and 8. In some embodiments, the at least two endogenous genes are SOCS1 and ZC3H12A, and wherein the gene-regulating system comprises at least one SOCS1-targeting gRNA molecule comprising a targeting domain sequence that binds to a nucleic acid sequence defined by any one of the set of genome coordinates shown in Tables 3 and 4 and at least one ZC3H12A-targeting gRNA molecule comprising a targeting domain sequence that binds to a nucleic acid sequence defined by any one of the set of genome coordinates shown in Tables 7 and 8. In some embodiments, the at least two endogenous genes are SOCS1 and ZC3H12A, and wherein the gene-regulating system comprises at least one SOCS1-targeting gRNA molecule comprising a targeting domain sequence that binds to a target DNA sequence selected from the group consisting of SEQ ID NOs: 7-151 and at least one ZC3H12A-targeting gRNA molecule comprising a targeting domain sequence that binds to a target DNA sequence selected from the group consisting of SEQ ID NOs: 208-230. In some embodiments, the at least two endogenous genes are SOCS1 and ZC3H12A, and wherein the gene-regulating system comprises at least one SOCS1-targeting gRNA molecule comprising a targeting domain sequence encoded by a nucleic acid sequence selected from the group consisting of SEQ ID NOs: 7-151 and at least one ZC3H12A-targeting gRNA molecule comprising a targeting domain sequence encoded by a nucleic acid sequence selected from the group consisting of SEQ ID NOs: 208-230.

[0012] In some embodiments, the at least two endogenous genes are PTPN2 and ZC3H12A, and wherein the gene-regulating system comprises at least one PTPN2-targeting gRNA molecule comprising a targeting domain sequence complementary to a nucleic acid sequence defined by any one of the set of genome coordinates shown in Tables 5 and 6 and at least one ZC3H12A-targeting gRNA molecule comprising a targeting domain sequence complementary to a nucleic acid sequence defined by any one of the set of genome coordinates shown in Tables 7 and 8. In some embodiments, the at least two endogenous genes are PTPN2 and ZC3H12A, and wherein the gene-regulating system comprises at least one PTPN2-targeting gRNA molecule comprising a targeting domain sequence that binds to a nucleic acid sequence defined by any one of the set of genome coordinates shown in Tables 5 and 6 and at least one ZC3H12A-targeting gRNA molecule comprising a targeting domain sequence that binds to a nucleic acid sequence defined by any one of the set of genome coordinates shown in Tables 7 and 8. In some embodiments, the at least two endogenous genes are PTPN2 and ZC3H12A, and wherein the gene-regulating system comprises at least one PTPN2-targeting gRNA molecule comprising a targeting domain sequence that binds to a target DNA sequence selected from the group consisting of SEQ ID NOs: 185-207 and at least one ZC3H12A-targeting gRNA molecule comprising a targeting domain sequence that binds to a target DNA sequence selected from the group consisting of SEQ ID NOs: 208-230. In some embodiments, the at least two endogenous genes are PTPN2 and ZC3H12A, and wherein the gene-regulating system comprises at least one PTPN2-targeting gRNA molecule comprising a targeting domain sequence encoded by a nucleic acid sequence selected from the group consisting of SEQ ID NOs: 185-207 and at least one ZC3H12A-targeting gRNA molecule comprising a targeting domain sequence encoded by a nucleic acid sequence selected from the group consisting of SEQ ID NOs: 208-230.

[0013] In some embodiments, the at least two endogenous genes are SOCS1 and PTPN2, and wherein the gene-regulating system comprises at least one SOCS1-targeting siRNA or shRNA molecule comprising about 19-30 nucleotides that are complementary to an RNA sequence encoded by a DNA sequence defined by a set of genome coordinates shown in Tables 3 and 4 and at least one PTPN2-targeting siRNA or shRNA molecule comprising about 19-30 nucleotides that are complementary to an RNA sequence encoded by a DNA sequence defined by a set of genome coordinates shown in Tables 5 and 6. In some embodiments, the at least two endogenous genes are SOCS1 and PTPN2, and wherein the gene-regulating system comprises at least one SOCS1-targeting siRNA or shRNA molecule comprising about 19-30 nucleotides that binds to an RNA sequence encoded by a DNA sequence defined by a set of genome coordinates shown in Tables 3 and 4 and at least one PTPN2-targeting siRNA or shRNA molecule comprising about 19-30 nucleotides that binds to an RNA sequence encoded by a DNA sequence defined by a set of genome coordinates shown in Tables 5 and 6. In some embodiments, the at least two endogenous genes are SOCS1 and PTPN2, wherein the gene-regulating system comprises at least one SOCS1-targeting siRNA or shRNA comprising about 19-30 nucleotides that bind to an RNA sequence encoded by a DNA sequence selected from the group consisting of SEQ ID NOs: 7-151 and at least one PTPN2-targeting siRNA or shRNA comprising about 19-30 nucleotides that bind to an RNA sequence encoded by a DNA sequence selected from the group consisting of SEQ ID NOs: 185-207.

[0014] In some embodiments, the at least two endogenous genes are SOCS1 and ZC3H12A, wherein the gene-regulating system comprises at least one SOCS1-targeting siRNA or shRNA molecule comprising about 19-30 nucleotides that are complementary to an RNA sequence encoded by a DNA sequence defined by a set of genome coordinates shown in Tables 3 and 4 and at least one ZC3H12A-targeting siRNA or shRNA molecule comprising about 19-30 nucleotides that are complementary to an RNA sequence encoded by a DNA sequence defined by a set of genome coordinates shown in Tables 7 and 8. In some embodiments, the at least two endogenous genes are SOCS1 and ZC3H12A, wherein the gene-regulating system comprises at least one SOCS1-targeting siRNA or shRNA molecule comprising about 19-30 nucleotides that binds to an RNA sequence encoded by a DNA sequence defined by a set of genome coordinates shown in Table 3 and 4 and at least one ZC3H12A-targeting siRNA or shRNA molecule comprising about 19-30 nucleotides that binds to an RNA sequence encoded by a DNA sequence defined by a set of genome coordinates shown in Tables 7 and 8. In some embodiments, the at least two endogenous genes are SOCS1 and ZC3H12A, wherein the gene-regulating system comprises at least one SOCS1-targeting siRNA or shRNA comprising about 19-30 nucleotides that binds to an RNA sequence encoded by a DNA sequence selected from the group consisting of SEQ ID NOs: 7-151 and at least one ZC3H12A-targeting siRNA or shRNA comprising about 19-30 nucleotides that binds to an RNA sequence encoded by a DNA sequence selected from the group consisting of SEQ ID NOs: 208-230.

[0015] In some embodiments, the at least two endogenous genes are PTPN2 and ZC3H12A, wherein the gene-regulating system comprises at least one PTPN2-targeting siRNA or shRNA molecule comprising about 19-30 nucleotides that are complementary to an RNA sequence encoded by a DNA sequence defined by a set of genome coordinates shown in Tables 5 and 6 and at least one ZC3H12A-targeting siRNA or shRNA molecule comprising about 19-30 nucleotides that are complementary to an RNA sequence encoded by a DNA sequence defined by a set of genome coordinates shown in Tables 7 and 8. In some embodiments, the at least two endogenous genes are PTPN2 and ZC3H12A, wherein the gene-regulating system comprises at least one PTPN2-targeting siRNA or shRNA molecule comprising about 19-30 nucleotides that binds to an RNA sequence encoded by a DNA sequence defined by a set of genome coordinates shown in Tables 5 and 6 and at least one ZC3H12A-targeting siRNA or shRNA molecule comprising about 19-30 nucleotides that binds to an RNA sequence encoded by a DNA sequence defined by a set of genome coordinates shown in Tables 7 and 8. In some embodiments, the at least two endogenous genes are PTPN2 and ZC3H12A, wherein the gene-regulating system comprises at least one PTPN2-targeting siRNA or shRNA comprising about 19-30 nucleotides that binds to an RNA sequence encoded by a DNA sequence selected from the group consisting of SEQ ID NOs: 185-207 and at least one ZC3H12A-targeting siRNA or shRNA comprising about 19-30 nucleotides that binds to an RNA sequence encoded by a DNA sequence selected from the group consisting of SEQ ID NOs: 208-230.

[0016] In some embodiments, the at least two endogenous genes are SOCS1 and PTPN2, and wherein the gene-regulating system comprises at least one SOCS1-targeting TALEN, zinc finger, or meganuclease protein that binds to a target DNA sequence defined by a set of genome coordinates shown in Tables 3 and 4 and at least one PTPN2-targeting TALEN, zinc finger, or meganuclease protein that binds to a target DNA sequence defined by a set of genome coordinates shown in Tables 5 and 6. In some embodiments, the at least two endogenous genes are SOCS1 and PTPN2, wherein the gene-regulating system comprises at least one SOCS1-targeting TALEN, zinc finger, or meganuclease protein that binds to a DNA sequence selected from SEQ ID NOs: 7-151 and at least one PTPN2-targeting TALEN, zinc finger, or meganuclease protein that binds to a DNA sequence selected from SEQ ID NOs: 185-207.

[0017] In some embodiments, the at least two endogenous genes are SOCS1 and ZC3H12A, wherein the gene-regulating system comprises at least one SOCS1-targeting TALEN, zinc finger, or meganuclease protein that binds to a target DNA sequence defined by a set of genome coordinates shown in Tables 3 and 4 and at least one ZC3H12A-targeting TALEN, zinc finger, or meganuclease protein that binds to a target DNA sequence defined by a set of genome coordinates shown in Tables 7 and 8. In some embodiments, the at least two endogenous genes are SOCS1 and ZC3H12A, wherein the gene-regulating system comprises at least one SOCS1-targeting TALEN, zinc finger, or meganuclease protein that binds to a DNA sequence selected from SEQ ID NOs: 7-151 and at least one ZC3H12A-targeting TALEN, zinc finger, or meganuclease protein that binds to a DNA sequence selected from SEQ ID NOs: 208-230.

[0018] In some embodiments, the at least two endogenous genes are PTPN2 and ZC3H12A, wherein the gene-regulating system comprises at least one PTPN2-targeting TALEN, zinc finger, or meganuclease protein that binds to a target DNA sequence defined by a set of genome coordinates shown in Tables 5 and 6 and at least one ZC3H12A-targeting TALEN, zinc finger, or meganuclease protein that binds to a target DNA sequence defined by a set of genome coordinates shown in Tables 7 and 8. In some embodiments, the at least two endogenous genes are PTPN2 and ZC3H12A, wherein the gene-regulating system comprises at least one PTPN2-targeting TALEN, zinc finger, or meganuclease protein that binds to a DNA sequence selected from SEQ ID NOs: 185-207 and at least one ZC3H12A-targeting TALEN, zinc finger, or meganuclease protein that binds to a DNA sequence selected from SEQ ID NOs: 208-230.

[0019] In some embodiments, the gene-regulating system is introduced to the immune effector cell by transfection, transduction, electroporation, or physical disruption of the cell membrane by a microfluidics device. In some embodiments, the gene-regulating system is introduced as a polynucleotide encoding one or more components of the system, a protein, or a ribonucleoprotein (RNP) complex.

[0020] In some embodiments, the present disclosure provides a modified immune effector cell, comprising reduced expression and/or function of at least two endogenous genes selected from SOCS1, PTPN2, and ZC3H12A, wherein the reduced expression and/or function of the at least two endogenous genes enhances an effector function of the immune effector cell. In some embodiments, the at least two target genes are SOCS1 and PTPN2. In some embodiments, the at least two target genes are SOCS1 and ZC3H12A. In some embodiments, the at least two target genes are PTPN2 and ZC3H12A.

[0021] In some embodiments, the present disclosure provides a modified immune effector cell, comprising an inactivating mutation in at least two endogenous genes selected from SOCS1, PTPN2, and ZC3H12A. In some embodiments, the immune effector cell is a tumor infiltrating lymphocyte (TIL) or a CAR-T cell. In some embodiments, the at least two target genes are SOCS1 and PTPN2. In some embodiments, the at least two target genes are SOCS1 and ZC3H12A. In some embodiments, the at least two target genes are PTPN2 and ZC3H12A. In some embodiments, the inactivating mutation comprises a deletion, substitution, or insertion of one or more nucleotides in the genomic sequences of the two or more endogenous genes. In some embodiments, the deletion is a partial or complete deletion of the two or more endogenous target genes. In some embodiments, the inactivating mutation is a frame shift mutation. In some embodiments, the inactivating mutation reduces the expression and/or function of the two or more endogenous target genes.

[0022] In some embodiments, the present disclosure provides a modified immune effector cell, comprising one or more exogenous polynucleotides encoding at least two nucleic acid inhibitors of at least two endogenous target genes selected from SOCS1, PTPN2, and ZC3H12A. In some embodiments, the immune effector cell is a tumor infiltrating lymphocyte (TIL) or a CAR-T cell. In some embodiments, the at least two target genes are SOCS1 and PTPN2. In some embodiments, the at least two target genes are SOCS1 and ZC3H12A. In some embodiments, the at least two target genes are PTPN2 and ZC3H12A. In some embodiments, the at least two nucleic acid inhibitors reduce the expression and/or function of the two or more endogenous target genes. In some embodiments, the expression of the two or more endogenous target genes is reduced by at least 50%, at least 60%, at least 70%, at least 80%, or at least 90% compared to an un-modified or control immune effector cell. In some embodiments, the function of the two or more endogenous target genes is reduced by at least 50%, at least 60%, at least 70%, at least 80%, or at least 90% compared to an un-modified or control immune effector cell. In some embodiments, the inactivating mutation or nucleic acid inhibitors substantially inhibits the expression of the two or more endogenous target genes. In some embodiments, the inactivating mutation or nucleic acid inhibitors substantially inhibits the function of the two or more endogenous target genes. In some embodiments, the inactivating mutation or nucleic acid inhibitors enhances one or more effector functions of the modified immune effector cell. In some embodiments, the one or more effector functions are enhanced compared to an un-modified or control immune effector cell.

[0023] In some embodiments, the immune effector cell is a T cell, a natural killer (NK) cell, an NKT cell, or a tumor infiltrating lymphocyte (TIL). In some embodiments, the modified immune effector cell further comprises an exogenous transgene expressing an immune activating molecule. In some embodiments, the immune activating molecule is selected from the group consisting of a cytokine, a chemokine, a co-stimulatory molecule, an activating peptide, an antibody, or an antigen-binding fragment thereof.

[0024] In some embodiments, the effector function is selected from cell proliferation, cell viability, tumor infiltration, cytotoxicity, anti-tumor immune responses, and/or resistance to exhaustion.

[0025] In some embodiments, the modified immune effector cell further comprises an engineered immune receptor displayed on the cell surface. In some embodiments, the engineered immune receptor is a chimeric antigen receptor (CAR) comprising an antigen-binding domain, a transmembrane domain, and an intracellular signaling domain. In some embodiments, the engineered immune receptor is an engineered T cell receptor (TCR). In some embodiments, the engineered immune receptor is capable of specifically binding to an antigen expressed on the surface of a target cell, wherein the antigen is a tumor-associated antigen.

[0026] In some embodiments, the present disclosure provides a composition comprising a modified immune effector cell described herein. In some embodiments, the composition comprises at least 1×10⁴, 1×10⁵, 1×10⁶, 1×10⁷, 1×10⁸, 1×10⁹, 1×10¹⁰, 1×10¹¹, or more modified immune effector cells. In some embodiments, the composition comprises a pharmaceutically acceptable carrier or diluent. In some embodiments, the composition comprises autologous immune effector cells. In some embodiments, the composition comprises allogeneic immune effector cells.

[0027] In some embodiments, the present disclosure provides a gene-regulating system capable of reducing expression of at least two endogenous target genes in a cell selected from SOCS1, PTPN2, and ZC3H12A, comprising (i) a nucleic acid molecule; (ii) an enzymatic protein; or (iii) a nucleic acid molecule and an enzymatic protein. In some embodiments, the at least two target genes are SOCS1 and PTPN2. In some embodiments, the at least two target genes are SOCS1 and ZC3H12A. In some embodiments, the at least two endogenous genes are PTPN2 and ZC3H12A.

[0028] In some embodiments, the system comprises at least two guide RNA (gRNA) nucleic acid molecules and a Cas endonuclease. In some embodiments, the at least two target genes are SOCS1 and PTPN2, and wherein the system comprises at least one SOCS1-targeting guide RNA (gRNA) molecule, at least one PTPN2-targeting gRNA molecule, and a Cas endonuclease. In some embodiments, the at least one SOCS1-targeting gRNA molecule comprises a targeting domain sequence complementary to a nucleic acid sequence defined by a set of genome coordinates shown in Tables 3 and 4 and the at least one PTPN2-targeting gRNA molecule comprises a targeting domain sequence complementary to a nucleic acid sequence defined by a set of genome coordinates shown in Tables 5 and 6. In some embodiments, the at least one SOCS1-targeting gRNA molecule comprises a targeting domain sequence that binds to a nucleic acid sequence defined by a set of genome coordinates shown in Tables 3 and 4 and the at least one PTPN2-targeting gRNA molecule comprises a targeting domain sequence that binds to a nucleic acid sequence defined by a set of genome coordinates shown in Tables 5 and 6. In some embodiments, the at least one SOCS1-targeting gRNA molecule comprises a targeting domain sequence that binds to a target DNA sequence selected from SEQ ID NOs: 7-151 and the at least one PTPN2-targeting gRNA molecule comprises a targeting domain sequence that binds to a target DNA sequence selected from SEQ ID NOs: 185-207. In some embodiments, the at least one SOCS1-targeting gRNA molecule comprises a targeting domain sequence encoded by a nucleic acid sequence selected from SEQ ID NOs: 7-151 and the at least one PTPN2-targeting gRNA molecule comprises a targeting domain sequence encoded by a nucleic acid sequence selected from SEQ ID NOs: 185-207.

[0029] In some embodiments, the at least two target genes are SOCS1 and ZC3H12A, and wherein the system comprises at least one SOCS1-targeting gRNA molecule, at least one ZC3H12A-targeting gRNA molecule, and a Cas endonuclease. In some embodiments, the at least one SOCS1-targeting gRNA molecule comprises a targeting domain sequence complementary to a nucleic acid sequence defined by a set of genome coordinates shown in Tables 3 and 4 and the at least one ZC3H12A-targeting gRNA molecule comprises a targeting domain sequence complementary to a nucleic acid sequence defined by a set of genome coordinates shown in Tables 7 and 8. In some embodiments, the at least one SOCS1-targeting gRNA molecule comprises a targeting domain sequence that binds to a nucleic acid sequence defined by a set of genome coordinates shown in Tables 3 and 4 and the at least one ZC3H12A-targeting gRNA molecule comprises a targeting domain sequence that binds to a nucleic acid sequence defined by a set of genome coordinates shown in Tables 7 and 8. In some embodiments, the at least one SOCS1-targeting gRNA molecule comprises a targeting domain sequence that binds to a target DNA sequence selected from SEQ ID NOs: 7-151 and the at least one ZC3H12A-targeting gRNA molecule comprises a targeting domain sequence that binds to a target DNA sequence selected from SEQ ID NOs: 208-230. In some embodiments, the at least one SOCS1-targeting gRNA molecule comprises a targeting domain sequence encoded by a nucleic acid sequence selected from SEQ ID NOs: 7-151 and the at least one ZC3H12A-targeting gRNA molecule comprises a targeting domain sequence encoded by a nucleic acid sequence selected from SEQ ID NOs: 208-230.

[0030] In some embodiments, the at least two endogenous genes are PTPN2 and ZC3H12A, wherein the system comprises at least one PTNP2-targeting gRNA molecule, at least one ZC3H12A-targeting gRNA molecule, and a Cas endonuclease. In some embodiments, the at least one PTPN2-targeting gRNA molecule comprises a targeting domain sequence complementary to a nucleic acid sequence defined by a set of genome coordinates shown in Tables 5 and 6 and the at least one ZC3H12A-targeting gRNA molecule comprises a targeting domain sequence complementary to a nucleic acid sequence defined by a set of genome coordinates shown in Tables 7 and 8. In some embodiments, the at least one PTPN2-targeting gRNA molecule comprises a targeting domain sequence that binds to a nucleic acid sequence defined by a set of genome coordinates shown in Tables 5 and 6 and the at least one ZC3H/2A-targeting gRNA molecule comprises a targeting domain sequence that binds to a nucleic acid sequence defined by a set of genome coordinates shown in Tables 7 and 8. In some embodiments, the at least one PTPN2-targeting gRNA molecule comprises a targeting domain sequence that binds to a target DNA sequence selected from SEQ ID NOs: 185-207 and the at least one ZC3H/2A-targeting gRNA molecule comprises a targeting domain sequence that binds to a target DNA sequence selected from SEQ ID NOs: 208-230. In some embodiments, the at least one PTPN2-targeting gRNA molecule comprises a targeting domain sequence encoded by a nucleic acid sequence selected from SEQ ID NOs: 185-207 and the at least one ZC3H/2A-targeting gRNA molecule comprises a targeting domain sequence encoded by a nucleic acid sequence selected from SEQ ID NOs: 208-230.

[0031] In some embodiments, the Cas protein is a Cas9 protein. In some embodiments, the Cas protein is a wild-type Cas protein comprising two enzymatically active domains, and capable of inducing double stranded DNA breaks. In some embodiments, the Cas protein is a Cas nickase mutant comprising one enzymatically active domain and capable of inducing single stranded DNA breaks. In some embodiments, the Cas protein is a deactivated Cas protein (dCas) and is associated with a heterologous protein capable of modulating the expression of the one or more endogenous target genes. In some embodiments, the heterologous protein is selected from the group consisting of MAX-interacting protein 1 (MXI1), Krüppel-associated box (KRAB) domain, and four concatenated mSin3 domains (SID4X).

[0032] In some embodiments, the system comprises at least two nucleic acid molecules and wherein the at least two nucleic acid molecules are selected from an siRNA, an shRNA, a microRNA (miR), an antagomiR, or an antisense RNA. In some embodiments, the at least two target genes are SOCS1 and PTPN2, and wherein the system comprises at least one SOCS1-targeting guide siRNA or shRNA molecule and at least one PTPN2-targeting siRNA or shRNA molecule. In some embodiments, the SOCS1-targeting siRNA or shRNA molecule comprises about 19-30 nucleotides that are complementary to an RNA sequence encoded by a DNA sequence defined by a set of genome coordinates shown in Tables 3 and 4 and the at least one PTPN2-targeting siRNA or shRNA molecule comprises about 19-30 nucleotides that are complementary to an RNA sequence encoded by a DNA sequence defined by a set of genome coordinates shown in Tables 5 and 6. In some embodiments, the at least one SOCS1-targeting siRNA or shRNA molecule comprises about 19-30 nucleotides that binds to an RNA sequence encoded by a DNA sequence defined by a set of genome coordinates shown in Tables 3 and 4 and the at least one PTPN2-targeting siRNA or shRNA molecule comprises about 19-30 nucleotides that binds to an RNA sequence encoded by a DNA sequence defined by a set of genome coordinates shown in Tables 5 and 6. In some embodiments, the at least one SOCS1-targeting siRNA or shRNA comprises about 19-30 nucleotides that bind to an RNA sequence encoded by a DNA sequence selected from SEQ ID NOs: 7-151 and the at least one PTPN2-targeting siRNA or shRNA comprises about 19-30 nucleotides that bind to an RNA sequence encoded by a DNA sequence selected from SEQ ID NOs: 185-207.

[0033] In some embodiments, the at least two target genes are SOCS1 and ZC3H12A, and wherein the system comprises at least one SOCS1-targeting guide siRNA or shRNA molecule and at least one ZC3H12A-targeting siRNA or shRNA molecule. In some embodiments, the at least one SOCS1-targeting siRNA or shRNA molecule comprises about 19-30 nucleotides that are complementary to an RNA sequence encoded by a DNA sequence defined by a set of genome coordinates shown in Tables 3 and 4 and the at least one ZC3H12A-targeting siRNA or shRNA molecule comprises about 19-30 nucleotides that are complementary to an RNA sequence encoded by a DNA sequence defined by a set of genome coordinates shown in Tables 7 and 8. In some embodiments, the at least one SOCS1-targeting siRNA or shRNA molecule comprises about 19-30 nucleotides that binds to an RNA sequence encoded by a DNA sequence defined by a set of genome coordinates shown in Tables 3 and 4 and the at least one ZC3H12A-targeting siRNA or shRNA molecule comprises about 19-30 nucleotides and binds to an RNA sequence encoded by a DNA sequence defined by a set of genome coordinates shown in Tables 7 and 8. In some embodiments, the at least one SOCS1-targeting siRNA or shRNA comprises about 19-30 nucleotides that bind to an RNA sequence encoded by a DNA sequence selected from SEQ ID NOs: 7-151 and the at least one ZC3H12A-targeting siRNA or shRNA comprises about 19-30 nucleotides that bind to an RNA sequence encoded by a DNA sequence selected from SEQ ID NOs: 208-230.

[0034] In some embodiments, the at least two target genes are PTPN2 and ZC3H12A, and wherein the system comprises at least one PTPN2-targeting guide siRNA or shRNA molecule and at least one ZC3H12A-targeting siRNA or shRNA molecule. In some embodiments, the at least one PTPN2-targeting siRNA or shRNA molecule comprises about 19-30 nucleotides that are complementary to an RNA sequence encoded by a DNA sequence defined by a set of genome coordinates shown in Tables 5 and 6 and the at least one ZC3H12A-targeting siRNA or shRNA molecule comprises about 19-30 nucleotides that are complementary to an RNA sequence encoded by a DNA sequence defined by a set of genome coordinates shown in Tables 7 and 8. In some embodiments, the at least one PTPN2-targeting siRNA or shRNA molecule comprises about 19-30 nucleotides that binds to an RNA sequence encoded by a DNA sequence defined by a set of genome coordinates shown in Tables 5 and 6 and the at least one ZC3H/2A-targeting siRNA or shRNA molecule comprises about 19-30 nucleotides that binds to an RNA sequence encoded by a DNA sequence defined by a set of genome coordinates shown in Tables 7 and 8. In some embodiments, the at least one PTPN2-targeting siRNA or shRNA comprises about 19-30 nucleotides that bind to an RNA sequence encoded by a DNA sequence selected from SEQ ID NOs: 185-207 and the at least one ZC3H/2A-targeting siRNA or shRNA comprises about 19-30 nucleotides that bind to an RNA sequence encoded by a DNA sequence selected from SEQ ID NOs: 208-230.

[0035] In some embodiments, the gene-regulating system comprises an enzymatic protein, and wherein the enzymatic protein has been engineered to specifically bind to a target sequence in one or more of the endogenous genes. In some embodiments, the system comprises a protein comprising a DNA binding domain and an enzymatic domain and is selected from a zinc finger nuclease and a transcription-activator-like effector nuclease (TALEN). In some embodiments, the system comprises one or more vectors encoding at least one gRNA targeting a first target gene, at least one gRNA targeting a second target gene, and a Cas endonuclease protein, wherein the first target gene is SOCS1 and the least one SOCS1-targeting gRNA comprises a targeting domain sequence encoded by a nucleic acid sequence selected from SEQ ID NOs: 7-151, and wherein the second target gene is PTPN2 and the at least one PTPN2-targeting gRNA comprises a targeting domain sequence encoded by a nucleic acid sequence selected from SEQ ID NOs: 185-207.

[0036] In some embodiments, the gene-regulating system comprises one or more vectors encoding at least one gRNA targeting a first target gene, at least one gRNA targeting a second target gene, and a Cas endonuclease protein, wherein the first target gene is SOCS1 and the least one SOCS1-targeting gRNA comprises a targeting domain sequence encoded by a nucleic acid sequence selected from SEQ ID NOs: 7-151, and wherein the second target gene is ZC3H12A and the at least one ZC3H/2A-targeting gRNA comprises a targeting domain sequence encoded by a nucleic acid sequence selected from SEQ ID NOs: 208-230.

[0037] In some embodiments, the gene-regulating system comprises one or more vectors encoding at least one gRNA targeting a first target gene, at least one gRNA targeting a second target gene, and a Cas endonuclease protein, wherein the first target gene is PTPN2 and the PTPN2-targeting gRNA comprises a targeting domain sequence encoded by a nucleic acid sequence selected from SEQ ID NOs: 185-207, and wherein the second target gene is ZC3H12A and the at least one ZC3H12A-targeting gRNA comprises a targeting domain sequence encoded by a nucleic acid sequence selected from SEQ ID NOs: 208-230.

[0038] In some embodiments, the at least one gRNA targeting the first target gene, the at least one gRNA targeting the second target gene, and the Cas endonuclease protein are encoded by one vector. In some embodiments, the at least one gRNA targeting the first target gene and the at least one gRNA targeting the second target gene are encoded by a first vector, and the Cas endonuclease protein is encoded by a second vector. In some embodiments, the at least one gRNA targeting the first target gene is encoded by a first vector, the at least one gRNA targeting the second target gene is encoded by a second vector, and the Cas endonuclease protein is encoded by a third vector.

[0039] In some embodiments, the gene-regulating system comprises (i) one or more vectors encoding at least one SOCS1-targeting gRNA comprising a targeting domain sequence encoded by a nucleic acid sequence selected from SEQ ID NOs: 7-151 and at least one PTPN2-targeting gRNA comprising a targeting domain sequence encoded by a nucleic acid sequence selected from SEQ ID NOs: 185-207; and (ii) an mRNA molecule encoding the Cas endonuclease protein.

[0040] In some embodiments, the gene-regulating system comprises (i) one or more vectors encoding at least one SOCS1-targeting gRNA comprising a targeting domain sequence encoded by a nucleic acid sequence selected from SEQ ID NOs: 7-151 and at least one ZC3H12A-targeting gRNA comprising a targeting domain sequence encoded by a nucleic acid sequence selected from SEQ ID NOs: 208-230; and (ii) an mRNA molecule encoding the Cas endonuclease protein.

[0041] In some embodiments, the gene-regulating system comprises (i) one or more vectors encoding at least one PTPN2-targeting gRNA comprising a targeting domain sequence encoded by a nucleic acid sequence selected from SEQ ID NOs: 185-207 and at least one ZC3H/2A-targeting gRNA comprising a targeting domain sequence encoded by a nucleic acid sequence selected from SEQ ID NOs: 208-230; and (ii) an mRNA molecule encoding the Cas endonuclease protein.

[0042] In some embodiments, the at least one gRNA targeting the first target gene and the at least one gRNA targeting the second target gene are encoded by one vector. In some embodiments, the at least one gRNA targeting the first target gene is encoded by a first vector and the at least one gRNA targeting the second target gene is encoded by a second vector.

[0043] In some embodiments, the gene-regulating system comprises (i) at least one SOCS1-targeting gRNA comprising a targeting domain sequence encoded by a nucleic acid sequence selected from SEQ ID NOs: 7-151 complexed to a first Cas endonuclease protein to form a first ribonucleoprotein (RNP) complex; and (ii) at least one PTPN2-targeting gRNA comprising a targeting domain sequence encoded by a nucleic acid sequence selected from SEQ ID NOs: 185-207 complexed to a second Cas endonuclease protein to form a second RNP complex.

[0044] In some embodiments, the gene-regulating system comprises (i) at least one SOCS1-targeting gRNA comprising a targeting domain sequence encoded by a nucleic acid sequence selected from SEQ ID NOs: 7-151 complexed to a first Cas endonuclease protein to form a first RNP complex; and (ii) at least one ZC3H/2A-targeting gRNA comprising a targeting domain sequence encoded by a nucleic acid sequence selected from SEQ ID NOs: 208-230 complexed to a second Cas endonuclease protein to form a second RNP complex.

[0045] In some embodiments, the gene-regulating system comprises (i) at least one PTPN2-targeting gRNA comprising a targeting domain sequence encoded by a nucleic acid sequence selected from SEQ ID NOs: 185-207 complexed to a first Cas endonuclease protein to form a first RNP complex; and (ii) at least one ZC3H/2A-targeting gRNA comprising a targeting domain sequence encoded by a nucleic acid sequence selected from SEQ ID NOs: 208-230 complexed to a second Cas endonuclease protein to form a second RNP complex.

[0046] In some embodiments, the present disclosure provides a kit comprising a gene-regulating system described herein.

[0047] In some embodiments, the present disclosure provides a composition comprising a plurality of gRNA molecules, wherein the plurality of gRNA molecules comprises at least one gRNA molecule targeting a first target gene and at least one gRNA molecule targeting a second target gene, wherein the first and second target gene are selected from SOCS1, PTPN2, and ZC3H12A. In some embodiments, the first target gene is SOCS1 and the second target gene is PTPN2. In some embodiments, the plurality of gRNA molecules comprises at least one SOCS1-targeting gRNA molecule comprising a targeting domain sequence complementary to a nucleic acid sequence defined by a set of genome coordinates shown in Tables 3 and 4 and at least one PTPN2-targeting gRNA molecule comprising a targeting domain sequence complementary to a nucleic acid sequence defined by a set of genome coordinates shown in Tables 5 and 6. In some embodiments, the plurality of gRNA molecules comprises at least one SOCS1-targeting gRNA molecule comprises a targeting domain sequence that binds to a nucleic acid sequence defined by a set of genome coordinates shown in Tables 3 and 4 and the at least one PTPN2-targeting gRNA molecule comprises a targeting domain sequence that binds to a nucleic acid sequence defined by a set of genome coordinates shown in Tables 5 and 6. In some embodiments, the plurality of gRNA molecules comprises at least one SOCS1-targeting gRNA molecule comprises a targeting domain sequence that binds to a target DNA sequence selected from SEQ ID NOs: 7-151 and the at least one PTPN2-targeting gRNA molecule comprises a targeting domain sequence that binds to a target DNA sequence selected from SEQ ID NOs: 185-207. In some embodiments, the plurality of gRNA molecules comprises at least one SOCS1-targeting gRNA molecule comprises a targeting domain sequence encoded by a nucleic acid sequence selected from SEQ ID NOs: 7-151 and the at least one PTPN2-targeting gRNA molecule comprises a targeting domain sequence encoded by a nucleic acid sequence selected from SEQ ID NOs: 185-207.

[0048] In some embodiments, the first target gene is SOCS1 and the second target gene is ZC3H12A. In some embodiments, the at least one SOCS1-targeting gRNA molecule comprises a targeting domain sequence complementary to a nucleic acid sequence defined by a set of genome coordinates shown in Tables 3 and 4 and the at least one ZC3H12A-targeting gRNA molecule comprises a targeting domain sequence complementary to a nucleic acid sequence defined by a set of genome coordinates shown in Tables 7 and 8. In some embodiments, the at least one SOCS1-targeting gRNA molecule comprises a targeting domain sequence that binds to a nucleic acid sequence defined by a set of genome coordinates shown in Tables 3 and 4 and the at least one ZC3H12A-targeting gRNA molecule comprises a targeting domain sequence that binds to a nucleic acid sequence defined by a set of genome coordinates shown in Tables 7 and 8. In some embodiments, the at least one SOCS1-targeting gRNA molecule comprises a targeting domain sequence that binds to a target DNA sequence selected from SEQ ID NOs: 7-151 and the at least one ZC3H12A-targeting gRNA molecule comprises a targeting domain sequence that binds to a target DNA sequence selected from SEQ ID NOs: 208-230. In some embodiments, the at least one SOCS1-targeting gRNA molecule comprises a targeting domain sequence encoded by a nucleic acid sequence selected from SEQ ID NOs: 7-151 and the at least one ZC3H12A-targeting gRNA molecule comprises a targeting domain sequence encoded by a nucleic acid sequence selected from SEQ ID NOs: 208-230.

[0049] In some embodiments, the first target gene is PTPN2 and the second target gene is ZC3H12A. In some embodiments, the at least one PTPN2-targeting gRNA molecule comprises a targeting domain sequence complementary to a nucleic acid sequence defined by a set of genome coordinates shown in Tables 5 and 6 and the at least one ZC3H12A-targeting gRNA molecule comprises a targeting domain sequence complementary to a nucleic acid sequence defined by a set of genome coordinates shown in Tables 7 and 8. In some embodiments, the at least one PTPN2-targeting gRNA molecule comprises a targeting domain sequence that binds to a nucleic acid sequence defined by a set of genome coordinates shown in Tables 5 and 6 and the at least one ZC3H12A-targeting gRNA molecule comprises a targeting domain sequence that binds to a nucleic acid sequence defined by a set of genome coordinates shown in Tables 7 and 8. In some embodiments, the at least one PTPN2-targeting gRNA molecule comprises a targeting domain sequence that binds to a target DNA sequence selected from SEQ ID NOs: 185-207 and the at least one ZC3H/2A-targeting gRNA molecule comprises a targeting domain sequence that binds to a target DNA sequence selected from SEQ ID NOs: 208-230. In some embodiments, the at least one PTPN2-targeting gRNA molecule comprises a targeting domain sequence encoded by a nucleic acid sequence selected from SEQ ID NOs: 185-207 and the at least one ZC3H/2A-targeting gRNA molecule comprises a targeting domain sequence encoded by a nucleic acid sequence selected from SEQ ID NOs: 208-230.

[0050] In some embodiments, the gRNAs are modular gRNA molecules. In some embodiments, the gRNAs are dual gRNA molecules. In some embodiments, the gRNA targeting domains are 16, 17, 18, 19, 20, 21, 22, 23, 24, 25, 26 or more nucleotides in length. In some embodiments, the gRNAs comprise a modification at or near the 5′ end (e.g., within 1-10, 1-5, or 1-2 nucleotides of the 5′ end) and/or a modification at or near the 3′ end (e.g., within 1-10, 1-5, or 1-2 nucleotides of the 3′ end). In some embodiments, the modified gRNAs exhibit increased resistance to nucleases when introduced into an immune effector cell. In some embodiments, the modified gRNAs do not induce an innate immune response when introduced into an immune effector cell or induce a decreased innate immune response compared to an unmodified gRNA when introduced into an immune effector cell.

[0051] In some embodiments, the present disclosure provides a polynucleotide molecule encoding a plurality of gRNA molecules, wherein the plurality of gRNA molecules comprises at least one gRNA molecule targeting a first target gene and at least one gRNA molecule targeting a second target gene, wherein the first and second target gene are selected from SOCS1, PTPN2, and ZC3H12A.

[0052] In some embodiments, the first target gene is SOCS1 and the second target gene is PTPN2. In some embodiments, the plurality of gRNA molecules comprises at least one SOCS1-targeting gRNA molecule comprising a targeting domain sequence complementary to a nucleic acid sequence defined by a set of genome coordinates shown in Tables 3 and 4 and at least one PTPN2-targeting gRNA molecule comprising a targeting domain sequence complementary to a nucleic acid sequence defined by a set of genome coordinates shown in Tables 5 and 6. In some embodiments, the plurality of gRNA molecules comprises at least one SOCS1-targeting gRNA molecule comprises a targeting domain sequence that binds to a nucleic acid sequence defined by a set of genome coordinates shown in Tables 3 and 4 and the at least one PTPN2-targeting gRNA molecule comprises a targeting domain sequence that binds to a nucleic acid sequence defined by a set of genome coordinates shown in Tables 5 and 6. In some embodiments, the plurality of gRNA molecules comprises at least one SOCS1-targeting gRNA molecule comprises a targeting domain sequence that binds to a target DNA sequence selected from SEQ ID NOs: 7-151 and the at least one PTPN2-targeting gRNA molecule comprises a targeting domain sequence that binds to a target DNA sequence selected from SEQ ID NOs: 185-207. In some embodiments, the plurality of gRNA molecules comprises at least one SOCS1-targeting gRNA molecule comprises a targeting domain sequence encoded by a nucleic acid sequence selected from SEQ ID NOs: 7-151 and the at least one PTPN2-targeting gRNA molecule comprises a targeting domain sequence encoded by a nucleic acid sequence selected from SEQ ID NOs: 185-207.

[0053] In some embodiments, the first target gene is SOCS1 and the second target gene is ZC3H12A. In some embodiments, the at least one SOCS1-targeting gRNA molecule comprises a targeting domain sequence complementary to a nucleic acid sequence defined by a set of genome coordinates shown in Tables 3 and 4 and the at least one ZC3H/2A-targeting gRNA molecule comprises a targeting domain sequence complementary to a nucleic acid sequence defined by a set of genome coordinates shown in Tables 7 and 8. In some embodiments, the at least one SOCS1-targeting gRNA molecule comprises a targeting domain sequence that binds to a nucleic acid sequence defined by a set of genome coordinates shown in Tables 3 and 4 and the at least one ZC3H12A-targeting gRNA molecule comprises a targeting domain sequence that binds to a nucleic acid sequence defined by a set of genome coordinates shown in Tables 7 and 8. In some embodiments, the at least one SOCS1-targeting gRNA molecule comprises a targeting domain sequence that binds to a target DNA sequence selected from SEQ ID NOs: 7-151 and the at least one ZC3H12A-targeting gRNA molecule comprises a targeting domain sequence that binds to a target DNA sequence selected from SEQ ID NOs: 208-230. In some embodiments, the at least one SOCS1-targeting gRNA molecule comprises a targeting domain sequence encoded by a nucleic acid sequence selected from SEQ ID NOs: 7-151 and the at least one ZC3H/2A-targeting gRNA molecule comprises a targeting domain sequence encoded by a nucleic acid sequence selected from SEQ ID NOs: 208-230.

[0054] In some embodiments, the first target gene is PTPN2 and the second target gene is ZC3H12A. In some embodiments, the at least one PTPN2-targeting gRNA molecule comprises a targeting domain sequence complementary to a nucleic acid sequence defined by a set of genome coordinates shown in Tables 5 and 6 and the at least one ZC3H12A-targeting gRNA molecule comprises a targeting domain sequence complementary to a nucleic acid sequence defined by a set of genome coordinates shown in Tables 7 and 8. In some embodiments, the at least one PTPN2-targeting gRNA molecule comprises a targeting domain sequence that binds to a nucleic acid sequence defined by a set of genome coordinates shown in Tables 5 and 6 and the at least one ZC3H12A-targeting gRNA molecule comprises a targeting domain sequence that binds to a nucleic acid sequence defined by a set of genome coordinates shown in Tables 7 and 8. In some embodiments, the at least one PTPN2-targeting gRNA molecule comprises a targeting domain sequence that binds to a target DNA sequence selected from SEQ ID NOs: 185-207 and the at least one ZC3H12A-targeting gRNA molecule comprises a targeting domain sequence that binds to a target DNA sequence selected from SEQ ID NOs: 208-230. In some embodiments, at least one PTPN2-targeting gRNA molecule comprises a targeting domain sequence encoded by a nucleic acid sequence selected from SEQ ID NOs: 185-207 and the at least one ZC3H12A-targeting gRNA molecule comprises a targeting domain sequence encoded by a nucleic acid sequence selected from SEQ ID NOs: 208-230.

[0055] In some embodiments, the present disclosure provides a polynucleotide molecule encoding a plurality of siRNA or shRNA molecules, wherein the plurality of siRNA or shRNA molecules comprises at least one siRNA or shRNA molecule targeting a first target gene and at least one siRNA or shRNA molecule targeting a second target gene, wherein the first and second target gene are selected from SOCS1, PTPN2, and ZC3H12A.

[0056] In some embodiments, the first target gene is SOCS1 and the second target gene is PTPN2. In some embodiments, the plurality of siRNA or shRNA molecules comprises at least one SOCS1-targeting siRNA or shRNA molecule comprising a targeting domain sequence that binds to an RNA sequence encoded by a DNA sequence defined by a set of genome coordinates shown in Tables 3 and 4 and at least one PTPN2-targeting siRNA or shRNA molecule comprising a targeting domain sequence complementary to an RNA sequence encoded by a DNA sequence defined by a set of genome coordinates shown in Tables 5 and 6. In some embodiments, the plurality of siRNA or shRNA molecules comprises at least one SOCS1-targeting siRNA or shRNA molecule comprising a targeting domain sequence t that binds to an RNA sequence encoded by a DNA sequence selected from SEQ ID NOs: 7-151 and the at least one PTPN2-targeting siRNA or shRNA molecule comprising a targeting domain sequence that binds to an RNA sequence encoded by a DNA sequence selected from SEQ ID NOs: 185-207.

[0057] In some embodiments, the first target gene is SOCS1 and the second target gene is ZC3H12A. In some embodiments, the at least one SOCS1-targeting siRNA or shRNA molecule comprising a targeting domain sequence that binds to an RNA sequence encoded by a DNA sequence defined by a set of genome coordinates shown in Tables 3 and 4 and the at least one ZC3H12A-targeting siRNA or shRNA molecule comprising a targeting domain sequence that binds to an RNA sequence encoded by a DNA sequence defined by a set of genome coordinates shown in Tables 7 and 8. In some embodiments, the at least one SOCS1-targeting siRNA or shRNA molecule comprising a targeting domain sequence that binds to an RNA sequence encoded by a DNA sequence selected from SEQ ID NOs: 7-151 and the at least one ZC3H12A-targeting siRNA or shRNA molecule comprising a targeting domain sequence that binds to an RNA sequence encoded by a DNA sequence selected from SEQ ID NOs: 208-230.

[0058] In some embodiments, the first target gene is PTPN2 and the second target gene is ZC3H12A. In some embodiments, the at least one PTPN2-targeting siRNA or shRNA molecule comprising a targeting domain sequence that binds to an RNA sequence encoded by a DNA sequence defined by a set of genome coordinates shown in Tables 5 and 6 and the at least one ZC3H12A-targeting siRNA or shRNA molecule comprising a targeting domain sequence that binds to an RNA sequence encoded by a DNA sequence defined by a set of genome coordinates shown in Tables 7 and 8. In some embodiments, the at least one PTPN2-targeting siRNA or shRNA molecule comprising a targeting domain sequence that binds to an RNA sequence encoded by a DNA sequence selected from SEQ ID NOs: 185-207 and the at least one ZC3H12A-targeting siRNA or shRNA molecule comprising a targeting domain sequence that binds to an RNA sequence encoded by a DNA sequence selected from SEQ ID NOs: 208-230.

[0059] In some embodiments, the present disclosure provides a polynucleotide molecule encoding at least one TALEN, zinc finger, or meganuclease protein targeting a first target gene and at least one TALEN, zinc finger, or meganuclease protein targeting a second target gene, wherein the first and second target gene are selected from SOCS1, PTPN2, and ZC3H12A.

[0060] In some embodiments, the first target gene is SOCS1 and the second target gene is PTPN2. In some embodiments, the polynucleotide encodes at least one SOCS1-targeting TALEN, zinc finger, or meganuclease protein comprising a targeting domain sequence that binds to a DNA sequence defined by a set of genome coordinates shown in Tables 3 and 4 and at least one PTPN2-targeting TALEN, zinc finger, or meganuclease protein comprising a targeting domain sequence that binds to a DNA sequence defined by a set of genome coordinates shown in Tables 5 and 6. In some embodiments, the polynucleotide encodes at least one SOCS1-targeting TALEN, zinc finger, or meganuclease protein comprising a targeting domain sequence that binds to a DNA sequence selected from SEQ ID NOs: 7-151 and at least one PTPN2-targeting TALEN, zinc finger, or meganuclease protein comprising a targeting domain sequence that binds to a DNA sequence selected from SEQ ID NOs: 185-207.

[0061] In some embodiments, the first target gene is SOCS1 and the second target gene is ZC3H12A. In some embodiments, the polynucleotide encodes at least one SOCS1-targeting TALEN, zinc finger, or meganuclease protein comprising a targeting domain sequence that binds to a DNA sequence defined by a set of genome coordinates shown in Tables 3 and 4 and the at least one ZC3H12A-targeting TALEN, zinc finger, or meganuclease protein comprising a targeting domain sequence that binds to a DNA sequence defined by a set of genome coordinates shown in Tables 7 and 8. In some embodiments, the polynucleotide encodes at least one SOCS1-targeting TALEN, zinc finger, or meganuclease protein comprising a targeting domain sequence that binds to a DNA sequence selected from SEQ ID NOs: 7-151 and at least one ZC3H12A-targeting TALEN, zinc finger, or meganuclease protein comprising a targeting domain sequence that binds to a DNA sequence selected from SEQ ID NOs: 208-230.

[0062] In some embodiments, the first target gene is PTPN2 and the second target gene is ZC3H12A. In some embodiments, the polynucleotide encodes least one PTPN2-targeting TALEN, zinc finger, or meganuclease protein comprising a targeting domain sequence that binds to a DNA sequence defined by a set of genome coordinates shown in Tables 5 and 6 and the at least one ZC3H12A-targeting TALEN, zinc finger, or meganuclease protein comprising a targeting domain sequence that binds to a DNA sequence defined by a set of genome coordinates shown in Tables 7 and 8. In some embodiments, the polynucleotide encodes at least one PTPN2-targeting TALEN, zinc finger, or meganuclease protein comprising a targeting domain sequence that binds to a DNA sequence selected from SEQ ID NOs: 185-207 and at least one ZC3H12A-targeting TALEN, zinc finger, or meganuclease protein comprising a targeting domain sequence that binds to a DNA sequence selected from SEQ ID NOs: 208-230.

[0063] In some embodiments, the present disclosure provides a composition comprising the polynucleotide described herein.

[0064] In some embodiments, the present disclosure provides a kit comprising the polynucleotide or composition described herein.

[0065] In some embodiments, the present disclosure provides a method of producing a modified immune effector cell comprising: introducing a gene-regulating system into the immune effector cell, wherein the gene-regulating system is capable of reducing expression and/or function of at least two endogenous target genes selected from SOCS1, PTPN2, and ZC3H12A.

[0066] In some embodiments, the present disclosure provides a method of producing a modified immune effector cell comprising: obtaining an immune effector cell from a subject; introducing a gene-regulating system into the immune effector cell, wherein the gene-regulating system is capable of reducing expression and/or function of at least two endogenous target genes selected from SOCS1, PTPN2, and ZC3H12A; and culturing the immune effector cell such that the expression and/or function of one or more endogenous target genes is reduced compared to an immune effector cell that has not been modified. In some embodiments, the gene-regulating system is one selected from those described herein. In some embodiments, the method further comprises introducing a polynucleotide sequence encoding an engineered immune receptor selected from a CAR and a TCR. In some embodiments, the gene-regulating system and/or the polynucleotide encoding the engineered immune receptor are introduced to the immune effector cell by transfection, transduction, electroporation, or physical disruption of the cell membrane by a microfluidics device. In some embodiments, the gene-regulating system is introduced as a polynucleotide sequence encoding one or more components of the system, as a protein, or as a ribonucleoprotein (RNP) complex.

[0067] In some embodiments, the present disclosure provides a method of producing a modified immune effector cell comprising: expanding a population of immune effector cells in a first round expansion and a second round of expansion; and introducing a gene-regulating system into the population of immune effector cells, wherein the gene-regulating system is capable of reducing expression and/or function of at least two endogenous target genes selected from SOCS1, PTPN2, and ZC3H12A.

[0068] In some embodiments, the present disclosure provides a method of producing a modified immune effector cell comprising: obtaining a population of immune effector cells; expanding the population of immune effector cells in a first round expansion and a second round of expansion; introducing a gene-regulating system into the population of immune effector cells, wherein the gene-regulating system is capable of reducing expression and/or function of at least two endogenous target genes selected from SOCS1, PTPN2, and ZC3H12A; and culturing the immune effector cell such that the expression and/or function of one or more endogenous target genes is reduced compared to an immune effector cell that has not been modified. In some embodiments, the gene-regulating system is introduced to the population of immune effector cells prior to the first and second rounds of expansion. In some embodiments, the gene-regulating system is introduced to the population of immune effector cells after the first round of expansion and prior to the second round of expansion. In some embodiments, the gene-regulating system is introduced to the population of immune effector cells after the first and second rounds of expansion. In some embodiments, the gene-regulating system is one selected from those described herein.

[0069] In some embodiments, the present disclosure provides a method of treating a disease or disorder in a subject in need thereof comprising administering to the subject an effective amount of the modified immune effector cells described herein or composition thereof. In some embodiments, the disease or disorder is a cell proliferative disorder, an inflammatory disorder, or an infectious disease. In some embodiments, the disease or disorder is a cancer or a viral infection. In some embodiments, the cancer is selected from a leukemia, a lymphoma, or a solid tumor. In some embodiments, the solid tumor is a melanoma, a pancreatic tumor, a bladder tumor, or a lung tumor or metastasis. In some embodiments, the cancer is a PD1 resistant or insensitive cancer. In some embodiments, the subject has previously been treated with a PD1 inhibitor or a PDL1 inhibitor. In some embodiments, the modified immune effector cells are autologous to the subject. In some embodiments, the modified immune effector cells are allogenic to the subject.

[0070] In some embodiments, the method further comprises administering to the subject an antibody or binding fragment thereof that specifically binds to and inhibits the function of the protein encoded by NRP1, HAVCR2, LAG3, TIGIT, CTLA4, or PDCD1. In some embodiments, the subject has not undergone lymphodepletion prior to administration of the modified immune effector cells or compositions thereof. In some embodiments, administration of the modified immune effector cells or compositions thereof to the subject is not accompanied by high dose IL-2 treatment. In some embodiments, administration of the modified immune effector cells or compositions thereof to the subject is not accompanied by any IL-2 treatment. In some embodiments, the subject has not undergone any IL-2 treatment prior to administration of the modified immune effector cells or compositions thereof. In some embodiments, the subject has not undergone any high dose IL-2 treatment prior to administration of the modified immune effector cells or compositions thereof. In some embodiments, the subject has not undergone lymphodepletion prior to administration of the modified immune effector cells or compositions thereof and the administration of modified immune effector cells or compositions thereof to the subject is not accompanied by high dose IL-2 treatment. In some embodiments, the subject has not undergone lymphodepletion prior to administration of the modified immune effector cells or compositions thereof and the administration of modified immune effector cells or compositions thereof to the subject is not accompanied by any IL-2 treatment. In some embodiments, the subject has not undergone lymphodepletion or high dose IL-2 treatment prior to administration of the modified immune effector cells or compositions thereof. In some embodiments, the subject has not undergone lymphodepletion or any IL-2 treatment prior to administration of the modified immune effector cells or compositions thereof.

[0071] In some embodiments, the present disclosure provides a method of killing a cancerous cell comprising exposing the cancerous cell to a modified immune effector cell described herein or composition thereof, wherein exposure to the modified immune effector cell results in increased killing of the cancerous cells compared to exposure to an immune effector cell that has not been modified. In some embodiments, the exposure is in vitro, in vivo, or ex vivo.

[0072] In some embodiments, the present disclosure provides a method of enhancing one or more effector functions of an immune effector cell comprising introducing a gene-regulating system into the immune effector cell, wherein the gene-regulating system is capable of reducing the expression and/or function of at least two endogenous target genes selected from SOCS1, PTPN2, and ZC3H12A.

[0073] In some embodiments, the present disclosure provides a method of enhancing one or more effector functions of an immune effector cell comprising: introducing a gene-regulating system into the immune effector cell, wherein the gene-regulating system is capable of reducing the expression and/or function of at least two endogenous target genes selected from SOCS1, PTPN2, and ZC3H12A; and culturing the immune effector cell such that the expression and/or function of one or more endogenous target genes is reduced compared to an immune effector cell that has not been modified, wherein the modified immune effector cell demonstrates one or more enhanced effector functions compared to the immune effector cell that has not been modified. In some embodiments, the one or more effector functions are selected from cell proliferation, cell viability, cytotoxicity, tumor infiltration, increased cytokine production, anti-tumor immune responses, and/or resistance to exhaustion. In some embodiments, the gene-regulating system is one described herein.

[0074] In some embodiments, the present disclosure provides a method of producing a modified immune effector cell comprising introducing an inactivating mutation in at least two endogenous target genes in an immune effector cell, wherein the at least two endogenous target genes are selected from SOCS1, PTPN2, and ZC3H12A.

[0075] In some embodiments, the present disclosure provides a method of producing a modified immune effector cell comprising: expanding a population of immune effector cells in a first round expansion and a second round of expansion; and introducing an inactivating mutation in at least two endogenous target genes in the population of immune effector cells, wherein the at least two endogenous target genes are selected from SOCS1, PTPN2, and ZC3H12A.

[0076] In some embodiments, the present disclosure provides a method of producing a modified immune effector cell comprising introducing one or more exogenous polynucleotides encoding at least two nucleic acid inhibitors of at least two endogenous target genes in an immune effector cell, wherein the at least two endogenous target genes are selected from SOCS1, PTPN2, and ZC3H12A.

[0077] In some embodiments, the present disclosure provides a method of producing a modified immune effector cell comprising: expanding a population of immune effector cells in a first round expansion and a second round of expansion; and introducing one or more exogenous polynucleotides encoding at least two nucleic acid inhibitors of at least two endogenous target genes in the population of immune effector cells, wherein the at least two endogenous target genes are selected from SOCS1, PTPN2, and ZC3H12A.

[0078] In some embodiments, the methods further comprise introducing a polynucleotide sequence encoding an engineered immune receptor selected from a CAR and a TCR. In some embodiments, the inactivating mutation is introduced by the nucleic acid gene-regulating system of any one of the preceding claims. In some embodiments, the at least two nucleic acid inhibitors are comprised in a gene-regulating system described herein.

[0079] In some embodiments, the disclosure provides a method of killing a cancerous cell in a subject in need thereof comprising administering to the subject a therapeutically effective amount of modified immune effector cell according to any one of claims 1-57 or the composition of any one of claims 79-83, wherein exposure to the modified immune effector cell results in increased killing of the cancerous cells compared to exposure to an immune effector cell that has not been modified, wherein the number of modified immune effector cells necessary to comprise a therapeutically effective amount is at least ten fold less or at least 100 fold less than the number of non-modified immune effector cells necessary to comprise a therapeutically effective amount. In some embodiments, the number of modified immune effector cells necessary to comprise a therapeutically effective amount is at least 1×10³, 5×10³, 1×10⁴, 5×10⁴, 1×10⁵, 5×10⁵, 1×10⁶, 2×10⁶, 3×10⁶, 4×10⁶, 5×10⁶, 1×10⁷, 5×10⁷, 1×10⁸, 5×10⁸, 1×10⁹ cells.

### BRIEF DESCRIPTION OF THE FIGURES

[0080] FIG. 1 shows the anti-tumor efficacy of Pptn2/Socs1 dual-edited transgenic T cells in a B16-Ova murine tumor model.

[0081] FIG. 2 shows the anti-tumor efficacy of Zc3h12a/Socs1 dual-edited transgenic T cells in a B16-Ova murine tumor model.

[0082] FIG. 3 shows the anti-tumor efficacy of Zc3h12a/Socs1 dual-edited TILs in a B16-Ova murine tumor model.

[0083] FIG. 4 shows the anti-tumor efficacy of Pd1/Lag3 dual-edited transgenic T cells in a B16-Ova murine tumor model.

[0084] FIG. 5 shows the increase in pSTAT5 levels in primary human CD8 T cells in response to IL-2 signaling after deletion of SOCS1.

[0085] FIG. 6 shows the increase pSTAT1 levels in Jurkat T cells in response to IFNγ stimulation after genetic knockdown of PTPN2.

[0086] FIGS. 7A-7D show the production of IFNγ (FIG. 7A) and TNFα (FIG. 7B) by dual SOCS1/PTPN2-edited human TILs as well as the ability of CD8 T cells within TIL populations to degranulate as measured by positivity (FIG. 7C) and intensity (FIG. 7D) of CD107a staining upon stimulation with phorbol 12-myristate 13-acetate (PMA) and ionomycin.

[0087] FIGS. 8A-8D show the ability of Ptpn2^{-/-}/Socs1^{-/-} OT1s to completely regress 100 mm³ B16Ova tumors in seventeen out of eighteen mice. (FIG. 8A). Also shown is the ability of the mice who previously regressed a B16Ova tumor to completely resist subsequent inoculation with B16Ova and partially resist subsequent parental B16F10 tumor inoculation. (FIG. 8B). The OT1 population in peripheral blood was tracked over the course of the rechallenge study (FIG. 8C) along with their memory phenotype (FIG. 8D).

[0088] FIGS. 9A-9E show the ability of Ptpn2^{-/-}/Socs1^{-/-} OT1s to completely regress larger 343 mm³B16Ova tumors in eight out of eight mice. (FIG. 9A). In a separate cohort of mice total OT1 infiltration into the tumor (FIG. 9B) and their ability to produce granzyme B (FIG. 9C) is presented. Also shown is the ability of the mice who previously regressed a B16Ova tumor to completely resist subsequent inoculation with B16Ova and partially resist subsequent parental B16F10 tumor inoculation. (FIG. 9D). The OT1 population in peripheral blood was tracked over the course of the rechallenge study along with their memory phenotype. (FIG. 9E).

[0089] FIGS. 10A-10H show tumor volume measurements after increasing doses of Ptpn2/Socs1 dual-edited or control edited mouse OT1 CD8+ T cells adoptively transferred into the large tumor B16Ova model. FIGS. 10A-10D show control cells administered at 4.1×10⁴, 4.1×10⁵, 4.1×10⁶ and 4.1×10⁷, respectively. FIGS. 10E-10H show Ptpn2/Socs1 dual-edited cells administered at 4.1×10⁴, 4.1×10⁵, 4.1×10⁶ and 4.1×10⁷, respectively. Each line represents the results for a separate animal.

### DETAILED DESCRIPTION

[0090] The present disclosure provides methods and compositions related to the modification of immune effector cells to increase their therapeutic efficacy in the context of immunotherapy. In some embodiments, immune effector cells are modified by the methods of the present disclosure to reduce the expression and/or function of two or more endogenous target genes selected from SOCS1, PTPN2, and ZC3H12A such that one or more effector functions of the immune cells are enhanced. In some embodiments, the immune effector cells are further modified by introduction of transgenes conferring antigen specificity, such as introduction of T cell receptor (TCR) or chimeric antigen receptor (CAR) expression constructs. In some embodiments, the present disclosure provides compositions and methods for modifying the immune effector cells, such as compositions of gene-regulating systems capable of reducing the expression and/or function of two or more endogenous target genes selected from SOCS1, PTPN2, and ZC3H12A. In some embodiments, the present disclosure provides methods of treating a cell proliferative disorder, such as a cancer, comprising administration of the modified immune effector cells described herein to a subject in need thereof.

### I. Definitions

[0091] As used in this specification and the appended claims, the singular forms “a,” “an” and “the” include plural references unless the content clearly dictates otherwise.

[0092] As used in this specification, the term “and/or” is used in this disclosure to mean either “and” or “or” unless indicated otherwise.

[0093] Throughout this specification, unless the context requires otherwise, the words “comprise”, or variations such as “comprises” or “comprising”, will be understood to imply the inclusion of a stated element or integer or group of elements or integers but not the exclusion of any other element or integer or group of elements or integers.

[0094] As used in this application, the terms “about” and “approximately” are used as equivalents. Any numerals used in this application with or without about/approximately are meant to cover any normal fluctuations appreciated by one of ordinary skill in the relevant art. In certain embodiments, the term “approximately” or “about” refers to a range of values that fall within 25%, 20%, 19%, 18%, 17%, 16%, 15%, 14%, 13%, 12%, 11%, 10%, 9%, 8%, 7%, 6%, 5%, 4%, 3%, 2%, 1%, or less in either direction (greater than or less than) of the stated reference value unless otherwise stated or otherwise evident from the context (except where such number would exceed 100% of a possible value).

[0095] “Decrease” or “reduce” refers to a decrease or a reduction in a particular value of at least 5%, for example, a 5%, 6%, 7%, 8%, 9%, 10%, 15%, 20%, 25%, 30%, 35%, 40%, 45%, 50%, 55%, 60%, 65%, 70%, 75%, 80%, 85%, 90%, 95%, 99%, or 100% decrease as compared to a reference value. A decrease or reduction in a particular value may also be represented as a fold-change in the value compared to a reference value, for example, at least a 1.1, 1.2, 1.3, 1.4, 1.5, 1.6, 1.7, 1.8, 1.9, 2, 3, 4, 5, 6, 7, 8, 9, 10, 15, 20, 30, 40, 50, 60, 70, 80, 90, 100, 200, 500, 1000-fold, or more, decrease as compared to a reference value.

[0096] “Increase” refers to an increase in a particular value of at least 5%, for example, a 5%, 6%, 7%, 8%, 9%, 10%, 15%, 20%, 25%, 30%, 35%, 40%, 45%, 50%, 55%, 60%, 65%, 70%, 75%, 80%, 85%, 90%, 95%, 99%, 100%, 200%, 300%, 400%, 500%, or more increase as compared to a reference value. An increase in a particular value may also be represented as a fold-change in the value compared to a reference value, for example, at least a 1.1, 1.2, 1.3, 1.4, 1.5, 1.6, 1.7, 1.8, 1.9, 2, 3, 4, 5, 6, 7, 8, 9, 10, 15, 20, 30, 40, 50, 60, 70, 80, 90, 100, 200, 500, 1000-fold or more, increase as compared to the level of a reference value.

[0097] The terms “peptide,” “polypeptide,” and “protein” are used interchangeably herein, and refer to a polymeric form of amino acids of any length, which can include coded and non-coded amino acids, chemically or biochemically modified or derivatized amino acids, and polypeptides having modified peptide backbones.

[0098] The terms “polynucleotide” and “nucleic acid,” used interchangeably herein, refer to a polymeric form of nucleotides of any length, either ribonucleotides or deoxyribonucleotides. Thus, this term includes, but is not limited to, single-, double-, or multi-stranded DNA or RNA, genomic DNA, cDNA, DNA-RNA hybrids, or a polymer comprising purine and pyrimidine bases or other natural, chemically or biochemically modified, non-natural, or derivatized nucleotide bases. “Oligonucleotide” generally refers to polynucleotides of between about 5 and about 100 nucleotides of single- or double-stranded DNA. However, for the purposes of this disclosure, there is no upper limit to the length of an oligonucleotide. Oligonucleotides are also known as “oligomers” or “oligos” and may be isolated from genes, or chemically synthesized by methods known in the art. The terms “polynucleotide” and “nucleic acid” should be understood to include, as applicable to the embodiments being described, single-stranded (such as sense or antisense) and double-stranded polynucleotides.

[0099] “Fragment” refers to a portion of a polypeptide or polynucleotide molecule containing less than the entire polypeptide or polynucleotide sequence. In some embodiments, a fragment of a polypeptide or polynucleotide comprises at least 10%, 20%, 30%, 40%, 50%, 60%, 70%, 80%, 90%, 95%, 96%, 97%, 98%, or 99% of the entire length of the reference polypeptide or polynucleotide. In some embodiments, a polypeptide or polynucleotide fragment may contain 5, 10, 15, 20, 25, 30, 35, 40, 45, 50, 60, 70, 80, 90, 100, 200, 300, 400, 500, 600, 700, 800, 900, 1000, or more nucleotides or amino acids.

[0100] The term “sequence identity” refers to the percentage of bases or amino acids between two polynucleotide or polypeptide sequences that are the same, and in the same relative position. As such one polynucleotide or polypeptide sequence has a certain percentage of sequence identity compared to another polynucleotide or polypeptide sequence. For sequence comparison, typically one sequence acts as a reference sequence, to which test sequences are compared. The term “reference sequence” refers to a molecule to which a test sequence is compared.

[0101] “Complementary” refers to the capacity for pairing, through base stacking and specific hydrogen bonding, between two sequences comprising naturally or non-naturally occurring bases or analogs thereof. For example, if a base at one position of a nucleic acid is capable of hydrogen bonding with a base at the corresponding position of a target, then the bases are considered to be complementary to each other at that position. Nucleic acids can comprise universal bases, or inert a basic spacers that provide no positive or negative contribution to hydrogen bonding. Base pairings may include both canonical Watson-Crick base pairing and non-Watson-Crick base pairing (e.g., Wobble base pairing and Hoogsteen base pairing). It is understood that for complementary base pairings, adenosine-type bases (A) are complementary to thymidine-type bases (T) or uracil-type bases (U), that cytosine-type bases (C) are complementary to guanosine-type bases (G), and that universal bases such as such as 3-nitropyrrole or 5-nitroindole can hybridize to and are considered complementary to any A, C, U, or T. Nichols et al., Nature, 1994; 369:492-493 and Loakes et al., Nucleic Acids Res., 1994; 22:4039-4043. Inosine (I) has also been considered in the art to be a universal base and is considered complementary to any A, C, U, or T. See Watkins and SantaLucia, Nucl. Acids Research, 2005; 33 (19): 6258-6267.

[0102] As referred to herein, a “complementary nucleic acid sequence” is a nucleic acid sequence comprising a sequence of nucleotides that enables it to non-covalently bind to another nucleic acid in a sequence-specific, antiparallel, manner (i.e., a nucleic acid specifically binds to a complementary nucleic acid) under the appropriate in vitro and/or in vivo conditions of temperature and solution ionic strength.

[0103] Methods of sequence alignment for comparison and determination of percent sequence identity and percent complementarity are well known in the art. Optimal alignment of sequences for comparison can be conducted, e.g., by the homology alignment algorithm of Needleman and Wunsch, (1970) J. Mol. Biol. 48:443, by the search for similarity method of Pearson and Lipman, (1988) Proc. Nat'l. Acad. Sci. USA 85:2444, by computerized implementations of these algorithms (GAP, BESTFIT, FASTA, and TFASTA in the Wisconsin Genetics Software Package, Genetics Computer Group, 575 Science Dr., Madison, Wis.), by manual alignment and visual inspection (see, e.g., Brent et al., (2003) Current Protocols in Molecular Biology), by use of algorithms know in the art including the BLAST and BLAST 2.0 algorithms, which are described in Altschul et al., (1977) Nuc. Acids Res. 25:3389-3402; and Altschul et al., (1990) J. Mol. Biol. 215:403-410, respectively. Software for performing BLAST analyses is publicly available through the National Center for Biotechnology Information.

[0104] Herein, the term “hybridize” refers to pairing between complementary nucleotide bases (e.g., adenine (A) forms a base pair with thymine (T) in a DNA molecule and with uracil (U) in an RNA molecule, and guanine (G) forms a base pair with cytosine (C) in both DNA and RNA molecules) to form a double-stranded nucleic acid molecule. (See, e.g., Wahl and Berger (1987) Methods Enzymol. 152:399; Kimmel, (1987) Methods Enzymol. 152:507). In addition, it is also known in the art that for hybridization between two RNA molecules (e.g., dsRNA), guanine (G) base pairs with uracil (U). For example, G/U base-pairing is partially responsible for the degeneracy (i.e., redundancy) of the genetic code in the context of tRNA anti-codon base-pairing with codons in mRNA. In the context of this disclosure, a guanine (G) of a protein-binding segment (dsRNA duplex) of a guide RNA molecule is considered complementary to a uracil (U), and vice versa. As such, when a G/U base-pair can be made at a given nucleotide position a protein-binding segment (dsRNA duplex) of a guide RNA molecule, the position is not considered to be non-complementary, but is instead considered to be complementary. It is understood in the art that the sequence of polynucleotide need not be 100% complementary to that of its target nucleic acid to be specifically hybridizable. Moreover, a polynucleotide may hybridize over one or more segments such that intervening or adjacent segments are not involved in the hybridization event (e.g., a loop structure or hairpin structure). A polynucleotide can comprise at least 70%, at least 80%, at least 90%, at least 95%, at least 99%, or 100% sequence complementarity to a target region within the target nucleic acid sequence to which they are targeted.

[0105] The term “modified” refers to a substance or compound (e.g., a cell, a polynucleotide sequence, and/or a polypeptide sequence) that has been altered or changed as compared to the corresponding unmodified substance or compound.

[0106] The term “naturally-occurring” as used herein as applied to a nucleic acid, a polypeptide, a cell, or an organism, refers to a nucleic acid, polypeptide, cell, or organism that is found in nature. For example, a polypeptide or polynucleotide sequence that is present in an organism (including viruses) that can be isolated from a source in nature and which has not been intentionally modified by a human in the laboratory is naturally occurring.

[0107] “Isolated” refers to a material that is free to varying degrees from components which normally accompany it as found in its native state.

[0108] An “expression cassette” or “expression construct” refers to a DNA polynucleotide sequence operably linked to a promoter. “Operably linked” refers to a juxtaposition wherein the components so described are in a relationship permitting them to function in their intended manner. For instance, a promoter is operably linked to a polynucleotide sequence if the promoter affects the transcription or expression of the polynucleotide sequence.

[0109] The term “recombinant vector” as used herein refers to a polynucleotide molecule capable transferring or transporting another polynucleotide inserted into the vector. The inserted polynucleotide may be an expression cassette. In some embodiments, a recombinant vector may be viral vector or a non-viral vector (e.g., a plasmid).

[0110] The term “sample” refers to a biological composition (e.g., a cell or a portion of a tissue) that is subjected to analysis and/or genetic modification. In some embodiments, a sample is a “primary sample” in that it is obtained directly from a subject; in some embodiments, a “sample” is the result of processing of a primary sample, for example to remove certain components and/or to isolate or purify certain components of interest.

[0111] The term “subject” includes animals, such as e.g. mammals. In some embodiments, the mammal is a primate. In some embodiments, the mammal is a human. In some embodiments, subjects are livestock such as cattle, sheep, goats, cows, swine, and the like; or domesticated animals such as dogs and cats. In some embodiments (e.g., particularly in research contexts) subjects are rodents (e.g., mice, rats, hamsters), rabbits, primates, or swine such as inbred pigs and the like. The terms “subject” and “patient” are used interchangeably herein.

[0112] “Administration” refers herein to introducing an agent or composition into a subject.

[0113] “Treating” as used herein refers to delivering an agent or composition to a subject to affect a physiologic outcome.

[0114] As used herein, the term “effective amount” refers to the minimum amount of an agent or composition required to result in a particular physiological effect. The effective amount of a particular agent may be represented in a variety of ways based on the nature of the agent, such as mass/volume, # of cells/volume, particles/volume, (mass of the agent)/(mass of the subject), # of cells/(mass of subject), or particles/(mass of subject). The effective amount of a particular agent may also be expressed as the half-maximal effective concentration (EC₅₀), which refers to the concentration of an agent that results in a magnitude of a particular physiological response that is half-way between a reference level and a maximum response level.

[0115] “Population” of cells refers to any number of cells greater than 1, but is preferably at least 1×10³ cells, at least 1×10⁴ cells, at least 1×10⁵ cells, at least 1×10⁶ cells, at least 1×10⁷ cells, at least 1×10⁸ cells, at least 1×10⁹ cells, at least 1×10¹⁰ cells, or more cells. A population of cells may refer to an in vitro population (e.g., a population of cells in culture) or an in vivo population (e.g., a population of cells residing in a particular tissue).

[0116] General methods in molecular and cellular biochemistry can be found in such standard textbooks as Molecular Cloning: A Laboratory Manual, 3rd Ed. (Sambrook et al., HaRBor Laboratory Press 2001); Short Protocols in Molecular Biology, 4th Ed. (Ausubel et al. eds., John Wiley & Sons 1999); Protein Methods (Bollag et al., John Wiley & Sons 1996); Nonviral Vectors for Gene Therapy (Wagner et al. eds., Academic Press 1999); Viral Vectors (Kaplift & Loewy eds., Academic Press 1995); Immunology Methods Manual (I. Lefkovits ed., Academic Press 1997); and Cell and Tissue Culture: Laboratory Procedures in Biotechnology (Doyle & Griffiths, John Wiley & Sons 1998), the disclosures of which are incorporated herein by reference.

### II. Modified Immune Effector Cells

[0117] In some embodiments, the present disclosure provides modified immune effector cells comprising reduced expression and/or function of two or more endogenous target genes selected from SOCS1, PTPN2, and ZC3H12A. In some embodiments, the present disclosure provides modified immune effector cells comprising a gene-regulating system capable of reducing the expression and/or function of two or more endogenous target genes selected from SOCS1, PTPN2, and ZC3H12A. Herein, the term “modified immune effector cells” encompasses immune effector cells comprising one or more genomic modifications resulting in the reduced expression and/or function of two or more endogenous target genes as well as immune effector cells comprising a gene-regulating system capable of reducing the expression and/or function of two or more endogenous target genes. Herein, an “un-modified immune effector cell” or “control immune effector cell” refers to a cell or population of cells wherein the genomes have not been modified and that does not comprise a gene-regulating system or comprises a control gene-regulating system (e.g., an empty vector control, a non-targeting gRNA, a scrambled siRNA, etc.).

[0118] The term “immune effector cell” refers to cells involved in mounting innate and adaptive immune responses, including but not limited to lymphocytes (such as T-cells (including thymocytes) and B-cells), natural killer (NK) cells, NKT cells, macrophages, monocytes, eosinophils, basophils, neutrophils, dendritic cells, and mast cells. In some embodiments, the modified immune effector cell is a T cell, such as a CD4+ T cell, a CD8+ T cell (also referred to as a cytotoxic T cell or CTL), a regulatory T cell (Treg), a Th1 cell, a Th2 cell, or a Th17 cell.

[0119] In some embodiments, the modified immune effector cell is a T cell that has been isolated from a tumor sample (referred to herein as “tumor infiltrating lymphocytes” or “TILs”). Without wishing to be bound by theory, it is thought that TILs possess increased specificity to tumor antigens (Radvanyi et al., 2012 Clin Canc Res 18:6758-6770) and can therefore mediate tumor antigen-specific immune response (e.g., activation, proliferation, and cytotoxic activity against the cancer cell) leading to cancer cell destruction (Brudno et al., 2018 Nat Rev Clin Onc 15:31-46)) without the introduction of an exogenous engineered receptor. Therefore, in some embodiments, TILs are isolated from a tumor in a subject, expanded ex vivo, and re-infused into a subject. In some embodiments, TILs are modified to express one or more exogenous receptors specific for an autologous tumor antigen, expanded ex vivo, and re-infused into the subject. Such embodiments can be modeled using in vivo mouse models wherein mice have been transplanted with a cancer cell line expressing a cancer antigen (e.g., CD19) and are treated with modified T cells that express an exogenous receptor that is specific for the cancer antigen (See e.g., Examples 6-9).

[0120] In some embodiments, the modified immune effector cell is an animal cell or is derived from an animal cell, including invertebrate animals and vertebrate animals (e.g., fish, amphibian, reptile, bird, or mammal). In some embodiments, the modified immune effector cell is a mammalian cell or is derived from a mammalian cell (e.g., a pig, a cow, a goat, a sheep, a rodent, a non-human primate, a human, etc.). In some embodiments, the modified immune effector cell is a rodent cell or is derived from a rodent cell (e.g., a rat or a mouse). In some embodiments, the modified immune effector cell is a human cell or is derived from a human cell.

[0121] In some embodiments, the modified immune effector cells comprise one or more modifications (e.g., insertions, deletions, or mutations of one or more nucleic acids) in the genomic DNA sequence of an endogenous target gene resulting in the reduced expression and/or function the endogenous gene. In such embodiments, the modified immune effector cells comprise a “modified endogenous target gene.” In some embodiments, the modifications in the genomic DNA sequence reduce or inhibit mRNA transcription, thereby reducing the expression level of the encoded mRNA transcript and protein. In some embodiments, the modifications in the genomic DNA sequence reduce or inhibit mRNA translation, thereby reducing the expression level of the encoded protein. In some embodiments, the modifications in the genomic DNA sequence encode a modified endogenous protein with reduced or altered function compared to the unmodified (i.e., wild-type) version of the endogenous protein (e.g., a dominant-negative mutant, described infra). In some embodiments, the modified immune effector cells comprise at least two modified endogenous target genes selected from SOCS1, PTPN2, and ZC3H12A.

[0122] In some embodiments, the modified immune effector cells comprise one or more genomic modifications at a genomic location other than an endogenous target gene that result in the reduced expression and/or function of the endogenous target gene or that result in the expression of a modified version of an endogenous protein. For example, in some embodiments, a polynucleotide sequence encoding a gene regulating system is inserted into one or more locations in the genome, thereby reducing the expression and/or function of an endogenous target gene upon the expression of the gene-regulating system. In some embodiments, a polynucleotide sequence encoding a modified version of an endogenous protein is inserted at one or more locations in the genome, wherein the function of the modified version of the protein is reduced compared to the un-modified or wild-type version of the protein (e.g., a dominant-negative mutant, described infra).

[0123] In some embodiments, the modified immune effector cells described herein comprise two or more modified endogenous target genes, wherein the one or more modifications result in a reduced expression and/or function of a gene product (i.e., an mRNA transcript or a protein) encoded by the endogenous target gene compared to an unmodified immune effector cell. For example, in some embodiments, a modified immune effector cell demonstrates reduced expression of an mRNA transcript and/or reduced expression of a protein. In some embodiments, the expression of the gene product in a modified immune effector cell is reduced by at least 5% compared to the expression of the gene product in an unmodified immune effector cell. In some embodiments, the expression of the gene product in a modified immune effector cell is reduced by at least 10%, 20%, 30%, 40%, 50%, 60%, 70%, 80%, 90%, or more compared to the expression of the gene product in an unmodified immune effector cell. In some embodiments, the modified immune effector cells described herein demonstrate reduced expression and/or function of gene products encoded by a plurality (e.g., two or more) of endogenous target genes compared to the expression of the gene products in an unmodified immune effector cell. For example, in some embodiments, a modified immune effector cell demonstrates reduced expression and/or function of gene products from 2, 3, 4, 5, 6, 7, 8, 9, 10, or more endogenous target genes compared to the expression of the gene products in an unmodified immune effector cell.

[0124] In some embodiments, the present disclosure provides a modified immune effector cell wherein two or more endogenous target genes, or a portion thereof, are deleted (i.e., “knocked-out”) such that the modified immune effector cell does not express the mRNA transcript or protein. In some embodiments, a modified immune effector cell comprises deletion of a plurality of endogenous target genes, or portions thereof. In some embodiments, a modified immune effector cell comprises deletion of 2, 3, 4, 5, 6, 7, 8, 9, 10, or more endogenous target genes.

[0125] In some embodiments, the modified immune effector cells described herein comprise one or more modified endogenous target genes, wherein the one or more modifications to the target DNA sequence result in expression of a protein with reduced or altered function (e.g., a “modified endogenous protein”) compared to the function of the corresponding protein expressed in an unmodified immune effector cell (e.g., a “unmodified endogenous protein”). In some embodiments, the modified immune effector cells described herein comprise 2, 3, 4, 5, 6, 7, 8, 9, 10, or more modified endogenous target genes encoding 2, 3, 4, 5, 6, 7, 8, 9, 10, or more modified endogenous proteins. In some embodiments, the modified endogenous protein demonstrates reduced or altered binding affinity for another protein expressed by the modified immune effector cell or expressed by another cell; reduced or altered signaling capacity; reduced or altered enzymatic activity; reduced or altered DNA-binding activity; or reduced or altered ability to function as a scaffolding protein.

[0126] In some embodiments, the modified endogenous target gene comprises one or more dominant negative mutations. As used herein, a “dominant-negative mutation” refers to a substitution, deletion, or insertion of one or more nucleotides of a target gene such that the encoded protein acts antagonistically to the protein encoded by the unmodified target gene. The mutation is dominant-negative because the negative phenotype confers genic dominance over the positive phenotype of the corresponding unmodified gene. A gene comprising one or more dominant-negative mutations and the protein encoded thereby are referred to as a “dominant-negative mutants”, e.g. dominant-negative genes and dominant-negative proteins. In some embodiments, the dominant negative mutant protein is encoded by an exogenous transgene inserted at one or more locations in the genome of the immune effector cell.

[0127] Various mechanisms for dominant negativity are known. Typically, the gene product of a dominant negative mutant retains some functions of the unmodified gene product but lacks one or more crucial other functions of the unmodified gene product. This causes the dominant-negative mutant to antagonize the unmodified gene product. For example, as an illustrative embodiment, a dominant-negative mutant of a transcription factor may lack a functional activation domain but retain a functional DNA binding domain. In this example, the dominant-negative transcription factor cannot activate transcription of the DNA as the unmodified transcription factor does, but the dominant-negative transcription factor can indirectly inhibit gene expression by preventing the unmodified transcription factor from binding to the transcription-factor binding site. As another illustrative embodiment, dominant-negative mutations of proteins that function as dimers are known. Dominant-negative mutants of such dimeric proteins may retain the ability to dimerize with unmodified protein but be unable to function otherwise. The dominant-negative monomers, by dimerizing with unmodified monomers to form heterodimers, prevent formation of functional homodimers of the unmodified monomers. Dominant negative mutations of the SOCS1 gene are known in the art and include the murine F59D mutant (See e.g., Hanada et al., J Biol Chem, 276:44:2 (2001), 40746-40754; and Suzuki et al., J Exp Med, 193:4 (2001), 471-482), and the human F58D mutant, identified by sequence alignments of the human and murine SOCS1 amino acid sequences.

[0128] In some embodiments, the modified immune effector cells comprise a gene-regulating system capable of reducing the expression and/or function of two or more endogenous target genes selected from SOCS1, PTPN2, and ZC3H12A. The gene-regulating system can reduce the expression and/or function of the endogenous target genes modifications by a variety of mechanisms including by modifying the genomic DNA sequence of the endogenous target gene (e.g., by insertion, deletion, or mutation of one or more nucleic acids in the genomic DNA sequence); by regulating transcription of the endogenous target gene (e.g., inhibition or repression of mRNA transcription); and/or by regulating translation of the endogenous target gene (e.g., by mRNA degradation).

[0129] In some embodiments, the modified immune effector cells described herein comprise a gene-regulating system comprising:

[0130] (a) two or more nucleic acid molecules capable of reducing the expression and/or modifying the function of a gene product encoded by two or more endogenous target genes selected from SOCS1, PTPN2, and ZC3H12A;

[0131] (b) one or more polynucleotides encoding two or more nucleic acid molecules that are capable of reducing the expression and/or modifying the function of the gene products encoded by two or more endogenous target genes selected from SOCS1, PTPN2, and ZC3H12A;

[0132] (c) two or more proteins capable of reducing the expression and/or modifying the function of the gene products encoded by two or more endogenous target genes selected from SOCS1, PTPN2, and ZC3H12A;

[0133] (d) one or more polynucleotides encoding two or more proteins that are capable of reducing the expression and/or modifying the function of a gene product encoded by two or more endogenous target genes selected from SOCS1, PTPN2, and ZC3H12A;

[0134] (e) two or more guide RNAs (gRNAs) capable of binding to a target DNA sequence in two or more endogenous genes selected from SOCS1, PTPN2, and ZC3H12A;

[0135] (f) one or more polynucleotides encoding two or more gRNAs capable of binding to a target DNA sequence in two or more endogenous genes selected from SOCS1, PTPN2, and ZC3H12A;

[0136] (g) one or more site-directed modifying polypeptides capable of interacting with a gRNA and modifying a target DNA sequence in an endogenous gene selected from SOCS1, PTPN2, and ZC3H12A;

[0137] (h) one or more polynucleotides encoding a site-directed modifying polypeptide capable of interacting with a gRNA and modifying a target DNA sequence in an endogenous gene selected from SOCS1, PTPN2, and ZC3H12A;

[0138] (i) two or more guide DNAs (gDNAs) capable of binding to a target DNA sequence in two or more endogenous genes selected from SOCS1, PTPN2, and ZC3H12A;

[0139] (j) one or more polynucleotides encoding two or more gDNAs capable of binding to a target DNA sequence in two or more endogenous genes selected from SOCS1, PTPN2, and ZC3H12A;

[0140] (k) one or more site-directed modifying polypeptides capable of interacting with a gDNA and modifying a target DNA sequence in an endogenous gene selected from SOCS1, PTPN2, and ZC3H12A;

[0141] (l) one or more polynucleotides encoding a site-directed modifying polypeptide capable of interacting with a gDNA and modifying a target DNA sequence in an endogenous gene selected from SOCS1, PTPN2, and ZC3H12A;

[0142] (m) two or more gRNAs capable of binding to a target mRNA sequence encoded by two or more endogenous genes selected from SOCS1, PTPN2, and ZC3H12A;

[0143] (n) one or more polynucleotides encoding two or more gRNAs capable of binding to a target mRNA sequence encoded by two or more endogenous genes selected from SOCS1, PTPN2, and ZC3H12A;

[0144] (o) one or more site-directed modifying polypeptides capable of interacting with a gRNA and modifying a target mRNA sequence encoded by an endogenous gene selected from SOCS1, PTPN2, and ZC3H12A;

[0145] (p) one or more polynucleotides encoding a site-directed modifying polypeptide capable of interacting with a gRNA and modifying a target mRNA sequence encoded by an endogenous gene selected from SOCS1, PTPN2, and ZC3H12A; or

[0146] (q) any combination of the above.

[0147] In some embodiments, one or more polynucleotides encoding the gene-regulating system are inserted into the genome of the immune effector cell. In some embodiments, one or more polynucleotides encoding the gene-regulating system are expressed episomaly and are not inserted into the genome of the immune effector cell.

[0148] In some embodiments, the modified immune effector cells described herein comprise reduced expression and/or function of two or more endogenous target genes and further comprise one or more exogenous transgenes inserted at one or more genomic loci (e.g., a genetic “knock-in”). In some embodiments, the one or more exogenous transgenes encode detectable tags, safety-switch systems, chimeric switch receptors, and/or engineered antigen-specific receptors.

[0149] In some embodiments, the modified immune effector cells described herein further comprise an exogenous transgene encoding a detectable tag. Examples of detectable tags include but are not limited to, FLAG tags, poly-histidine tags (e.g. 6xHis), SNAP tags, Halo tags, cMyc tags, glutathione-S-transferase tags, avidin, enzymes, fluorescent proteins, luminescent proteins, chemiluminescent proteins, bioluminescent proteins, and phosphorescent proteins. In some embodiments the fluorescent protein is selected from the group consisting of blue/UV proteins (such as BFP, TagBFP, mTagBFP2, Azurite, EBFP2, mKalama1, Sirius, Sapphire, and T-Sapphire); cyan proteins (such as CFP, eCFP, Cerulean, SCFP3A, mTurquoise, mTurquoise2, monomeric Midoriishi-Cyan, TagCFP, and mTFP1); green proteins (such as: GFP, eGFP, meGFP (A208K mutation), Emerald, Superfolder GFP, Monomeric Azami Green, TagGFP2, mUKG, mWasabi, Clover, and mNeonGreen); yellow proteins (such as YFP, eYFP, Citrine, Venus, SYFP2, and TagYFP); orange proteins (such as Monomeric Kusabira-Orange, mKOK, mKO2, mOrange, and mOrange2); red proteins (such as RFP, mRaspberry, mCherry, mStrawberry, mTangerine, tdTomato, TagRFP, TagRFP-T, mApple, mRuby, and mRuby2); far-red proteins (such as mPlum, HcRed-Tandem, mKate2, mNeptune, and NirFP); near-infrared proteins (such as TagRFP657, IFP1.4, and iRFP); long stokes shift proteins (such as mKeima Red, LSS-mKate1, LSS-mKate2, and mBeRFP); photoactivatible proteins (such as PA-GFP, PAmCherryl, and PATagRFP); photoconvertible proteins (such as Kaede (green), Kaede (red), KikGR1 (green), KikGR1 (red), PS-CFP2, PS-CFP2, mEos2 (green), mEos2 (red), mEos3.2 (green), mEos3.2 (red), PSmOrange, and PSmOrange); and photoswitchable proteins (such as Dronpa). In some embodiments, the detectable tag can be selected from AmCyan, AsRed, DsRed2, DsRed Express, E2-Crimson, HcRed, ZsGreen, ZsYellow, mCherry, mStrawberry, mOrange, mBanana, mPlum, mRasberry, tdTomato, DsRed Monomer, and/or AcGFP, all of which are available from Clontech.

[0150] In some embodiments, the modified immune effector cells described herein further comprise an exogenous transgene encoding a safety-switch system. Safety-switch systems (also referred to in the art as suicide gene systems) comprise exogenous transgenes encoding for one or more proteins that enable the elimination of a modified immune effector cell after the cell has been administered to a subject. Examples of safety-switch systems are known in the art. For example, safety-switch systems include genes encoding for proteins that convert non-toxic pro-drugs into toxic compounds such as the Herpes simplex thymidine kinase (Hsv-tk) and ganciclovir (GCV) system (Hsv-tk/GCV). Hsv-tk converts non-toxic GCV into a cytotoxic compound that leads to cellular apoptosis. As such, administration of GCV to a subject that has been treated with modified immune effector cells comprising a transgene encoding the Hsv-tk protein can selectively eliminate the modified immune effector cells while sparing endogenous immune effector cells. (See e.g., Bonini et al., Science, 1997, 276(5319):1719-1724; Ciceri et al., Blood, 2007, 109(11):1828-1836; Bondanza et al., Blood 2006, 107(5):1828-1836).

[0151] Additional safety-switch systems include genes encoding for cell-surface markers, enabling elimination of modified immune effector cells by administration of a monoclonal antibody specific for the cell-surface marker via ADCC. In some embodiments, the cell-surface marker is CD20 and the modified immune effector cells can be eliminated by administration of an anti-CD20 monoclonal antibody such as Rituximab (See e.g., Introna et al., Hum Gene Ther, 2000, 11(4):611-620; Serafini et al., Hum Gene Ther, 2004, 14, 63-76; van Meerten et al., Gene Ther, 2006, 13, 789-797). Similar systems using EGF-R and Cetuximab or Panitumumab are described in International PCT Publication No. WO 2018006880. Additional safety-switch systems include transgenes encoding pro-apoptotic molecules comprising one or more binding sites for a chemical inducer of dimerization (CID), enabling elimination of modified immune effector cells by administration of a CID which induces oligomerization of the pro-apoptotic molecules and activation of the apoptosis pathway. In some embodiments, the pro-apoptotic molecule is Fas (also known as CD95) (Thomis et al., Blood, 2001, 97(5), 1249-1257). In some embodiments, the pro-apoptotic molecule is caspase-9 (Straathof et al., Blood, 2005, 105(11), 4247-4254).

[0152] In some embodiments, the modified immune effector cells described herein further comprise an exogenous transgene encoding a chimeric switch receptor. Chimeric switch receptors are engineered cell-surface receptors comprising an extracellular domain from an endogenous cell-surface receptor and a heterologous intracellular signaling domain, such that ligand recognition by the extracellular domain results in activation of a different signaling cascade than that activated by the wild type form of the cell-surface receptor. In some embodiments, the chimeric switch receptor comprises the extracellular domain of an inhibitory cell-surface receptor fused to an intracellular domain that leads to the transmission of an activating signal rather than the inhibitory signal normally transduced by the inhibitory cell-surface receptor. In particular embodiments, extracellular domains derived from cell-surface receptors known to inhibit immune effector cell activation can be fused to activating intracellular domains. Engagement of the corresponding ligand will then activate signaling cascades that increase, rather than inhibit, the activation of the immune effector cell. For example, in some embodiments, the modified immune effector cells described herein comprise a transgene encoding a PD1-CD28 switch receptor, wherein the extracellular domain of PD1 is fused to the intracellular signaling domain of CD28 (See e.g., Liu et al., Cancer Res 76:6 (2016), 1578-1590 and Moon et al., Molecular Therapy 22 (2014), S201). In some embodiments, the modified immune effector cells described herein comprise a transgene encoding the extracellular domain of CD200R and the intracellular signaling domain of CD28 (See Oda et al., Blood 130:22 (2017), 2410-2419).

[0153] In some embodiments, the modified immune effector cells described herein further comprise an engineered antigen-specific receptor recognizing a protein target expressed by a target cell, such as a tumor cell or an antigen presenting cell (APC), referred to herein as “modified receptor-engineered cells” or “modified RE-cells”. The term “engineered antigen receptor” refers to a non-naturally occurring antigen-specific receptor such as a chimeric antigen receptor (CAR) or a recombinant T cell receptor (TCR). In some embodiments, the engineered antigen receptor is a CAR comprising an extracellular antigen binding domain fused via hinge and transmembrane domains to a cytoplasmic domain comprising a signaling domain. In some embodiments, the CAR extracellular domain binds to an antigen expressed by a target cell in an MHC-independent manner leading to activation and proliferation of the RE cell. In some embodiments, the extracellular domain of a CAR recognizes a tag fused to an antibody or antigen-binding fragment thereof. In such embodiments, the antigen-specificity of the CAR is dependent on the antigen-specificity of the labeled antibody, such that a single CAR construct can be used to target multiple different antigens by substituting one antibody for another (See e.g., U.S. Pat. Nos. 9,233,125 and 9,624,279; US Patent Application Publication Nos. 20150238631 and 20180104354). In some embodiments, the extracellular domain of a CAR may comprise an antigen binding fragment derived from an antibody. Antigen binding domains that are useful in the present disclosure include, for example, scFvs; antibodies; antigen binding regions of antibodies; variable regions of the heavy/light chains; and single chain antibodies.

[0154] In some embodiments, the intracellular signaling domain of a CAR may be derived from the TCR complex zeta chain (such as CD3 signaling domains), FcγRIII, FccRI, or the T-lymphocyte activation domain. In some embodiments, the intracellular signaling domain of a CAR further comprises a costimulatory domain, for example a 4-1BB, CD28, CD40, MyD88, or CD70 domain. In some embodiments, the intracellular signaling domain of a CAR comprises two costimulatory domains, for example any two of 4-1BB, CD28, CD40, MyD88, or CD70 domains. Exemplary CAR structures and intracellular signaling domains are known in the art (See e.g., WO 2009/091826; US 20130287748; WO 2015/142675; WO 2014/055657; and WO 2015/090229, incorporated herein by reference).

[0155] CARs specific for a variety of tumor antigens are known in the art, for example CD171-specific CARs (Park et al., Mol Ther (2007) 15(4):825-833), EGFRvIII-specific CARs (Morgan et al., Hum Gene Ther (2012) 23(10):1043-1053), EGF-R-specific CARs (Kobold et al., J Natl Cancer Inst (2014) 107(1):364), carbonic anhydrase K-specific CARs (Lamers et al., Biochem Soc Trans (2016) 44(3):951-959), FR-α-specific CARs (Kershaw et al., Clin Cancer Res (2006) 12(20):6106-6015), HER2-specific CARs (Ahmed et al., J Clin Oncol (2015) 33(15)1688-1696; Nakazawa et al., Mol Ther (2011) 19(12):2133-2143; Ahmed et al., Mol Ther (2009) 17(10):1779-1787; Luo et al., Cell Res (2016) 26(7):850-853; Morgan et al., Mol Ther (2010) 18(4):843-851; Grada et al., Mol Ther Nucleic Acids (2013) 9(2):32), CEA-specific CARs (Katz et al., Clin Cancer Res (2015) 21(14):3149-3159), IL13Rα2-specific CARs (Brown et al., Clin Cancer Res (2015) 21(18):4062-4072), GD2-specific CARs (Louis et al., Blood (2011) 118(23):6050-6056; Caruana et al., Nat Med (2015) 21(5):524-529), ErbB2-specific CARs (Wilkie et al., J Clin Immunol (2012) 32(5):1059-1070), VEGF-R-specific CARs (Chinnasamy et al., Cancer Res (2016) 22(2):436-447), FAP-specific CARs (Wang et al., Cancer Immunol Res (2014) 2(2):154-166), MSLN-specific CARs (Moon et al, Clin Cancer Res (2011) 17(14):4719-30), NKG2D-specific CARs (VanSeggelen et al., Mol Ther (2015) 23(10):1600-1610), CD19-specific CARs (Axicabtagene ciloleucel (Yescarta®) and Tisagenlecleucel (Kymriah®). See also, Li et al., J Hematol and Oncol (2018) 11(22), reviewing clinical trials of tumor-specific CARs. Exemplary CARs suitable for use according to the present disclosure are described below in Table 1.

TABLE 1
Exemplary CAR constructs

| | | Ag- | Intra- | Trans- | AA | NA |
|---|---|---|---|---|---|---|
| | | binding | cellular | membrane | SEQ | SEQ |
| CAR Ref ID | Target | domain | Domain | Domain | ID | ID |
| KSQCAR017 | human | Cetuximab | CD3 | CD8a | 264 | 265 |
| | EGFR | H225 scFv | zeta | hinge | | |
| KSQCAR1909 | human | FMC63 | CD3 | CD8a | 266 | 267 |
| | CD19 | scFv | zeta | hinge | | |
| KSQCAR010 | human | Herceptin | CD3 | CD8a | 268 | 269 |
| | HER2 | scFv | zeta | hinge | | |

[0156] In some embodiments, the engineered antigen receptor is a recombinant TCR. Recombinant TCRs comprise TCRα and/or TCRβ chains that have been isolated and cloned from T cell populations recognizing a particular target antigen. For example, TCRα and/or TCRβ genes (i.e., TRAC and TRBC) can be cloned from T cell populations isolated from individuals with particular malignancies or T cell populations that have been isolated from humanized mice immunized with specific tumor antigens or tumor cells. Recombinant TCRs recognize antigen through the same mechanisms as their endogenous counterparts (e.g., by recognition of their cognate antigen presented in the context of major histocompatibility complex (MHC) proteins expressed on the surface of a target cell). This antigen engagement stimulates endogenous signal transduction pathways leading to activation and proliferation of the TCR-engineered cells.

[0157] Recombinant TCRs specific for tumor antigens are known in the art, for example WT1-specific TCRs (JTCR016, Juno Therapeutics; WT1-TCRc4, described in US Patent Application Publication No. 20160083449), MART-1 specific TCRs (including the DMF4T clone, described in Morgan et al., Science 314 (2006) 126-129); the DMF5T clone, described in Johnson et al., Blood 114 (2009) 535-546); and the ID3T clone, described in van den Berg et al., Mol. Ther. 23 (2015) 1541-1550), gp100-specific TCRs (Johnson et al., Blood 114 (2009) 535-546), CEA-specific TCRs (Parkhurst et al., Mol Ther. 19 (2011) 620-626), NY-ESO and LAGE-1 specific TCRs (1G4T clone, described in Robbins et al., J Clin Oncol 26 (2011) 917-924; Robbins et al., Clin Cancer Res 21 (2015) 1019-1027; and Rapoport et al., Nature Medicine 21 (2015) 914-921), and MAGE-A3-specific TCRs (Morgan et al., J Immunother 36 (2013) 133-151) and Linette et al., Blood 122 (2013) 227-242). (See also, Debets et al., Seminars in Immunology 23 (2016) 10-21).

[0158] To generate the recombinant TCRs, the native TRAC (SEQ ID NO: 260) and TRBC (SEQ ID NOs: 262) protein sequences are fused to the C-terminal ends of TCR-α and TCR-β chain variable regions specific for a protein or peptide of interest. For example, the engineered TCR can recognize an amino acid sequence comprising the NY-ESO peptide (SLLMWITQC, SEQ ID NO: 239), such as the 1G4 TCR or the 95:LY TCR (Robbins et al, Journal of Immunology 2008 180:6116-6131). In such illustrative embodiments, the paired 1G4-TCR α/βchains comprise SEQ ID NOs: 249 and 248, respectively and the paired 95:LY-TCR α/βchains comprise SEQ ID NOs: 252 and 251, respectively. The recombinant TCR can recognize the MART-1 peptide (AAGIGILTV, SEQ ID NO: 240), such as the DMF4 and DMF5 TCRs (Robbins et al, Journal of Immunology 2008 180:6116-6131). In such illustrative embodiments, the paired DMF4-TCR α/β chains comprise SEQ ID NOs: 255 and 254, respectively and the paired DMF5-TCR α/βchains comprise SEQ ID NOs: 258 and 257, respectively. The recombinant TCR can recognize the WT-1 peptide (RMFPNAPYL, SEQ ID NO: 241), such as the DLT TCR (Robbins et al, Journal of Immunology 2008 180:6116-6131). In such illustrative embodiments, the paired high-affinity DLT-TCR α/β chains comprise SEQ ID NOs: 246 and 245, respectively.

[0159] Codon-optimized DNA sequences encoding the recombinant TCRα and TCRβ chain proteins can be generated such that expression of both TCR chains is driven off of a single promoter in a stoichiometric fashion. In such embodiment, the P2A sequence (SEQ ID NO: 238) can be inserted between the DNA sequences encoding the TCRβ and the TCRα chain, such that the expression cassettes encoding the recombinant TCR chains comprise the following format: TCRβ-P2A-TCRα. As an illustrative embodiment, the protein sequence of the 1G4 NY-ESO-specific TCR expressed from such a cassette would comprise SEQ ID NO: 250, the protein sequence of the 95:LY NY-ESO-specific TCR expressed from such a cassette would comprise SEQ ID NO: 23, the protein sequence of the DMF4 MART1-specific TCR expressed from such a cassette would comprise SEQ ID NO: 256, the protein sequence of the DMF5 MART1-specific TCR expressed from such a cassette would comprise SEQ ID NO: 259, and the protein sequence of the DLT WT1-specific TCR expressed from such a cassette would comprise SEQ ID NO: 247.

[0160] In some embodiments, the engineered antigen receptor is directed against a target antigen selected from a cluster of differentiation molecule, such as CD3, CD4, CD8, CD16, CD24, CD25, CD33, CD34, CD45, CD64, CD71, CD78, CD80 (also known as B7-1), CD86 (also known as B7-2), CD96, CD116, CD117, CD123, CD133, and CD138, CD371 (also known as CLL1); a tumor-associated surface antigen, such as 5T4, BCMA (also known as CD269 and TNFRSF17, UniProt # Q02223), carcinoembryonic antigen (CEA), carbonic anhydrase 9 (CAIX or MN/CAIX), CD19, CD20, CD22, CD30, CD40, disialogangliosides such as GD2, ELF2M, ductal-epithelial mucin, ephrin B2, epithelial cell adhesion molecule (EpCAM), ErbB2 (HER2/neu), FCRL5 (UniProt # Q68SN8), FKBP11 (UniProt # Q9NYL4), glioma-associated antigen, glycosphingolipids, gp36, GPRC5D (UniProt # Q9NZD1), mut hsp70-2, intestinal carboxyl esterase, IGF-I receptor, ITGA8 (UniProt # P53708), KAMP3, LAGE-1a, MAGE, mesothelin, neutrophil elastase, NKG2D, Nkp30, NY-ESO-1, PAP, prostase, prostate-carcinoma tumor antigen-1 (PCTA-1), prostate specific antigen (PSA), PSMA, prostein, RAGE-1, ROR1, RU1 (SFMBT1), RU2 (DCDC2), SLAMF7 (UniProt # Q9NQ25), survivin, TAG-72, and telomerase; a major histocompatibility complex (MHC) molecule presenting a tumor-specific peptide epitope; tumor stromal antigens, such as the extra domain A (EDA) and extra domain B (EDB) of fibronectin; the A1 domain of tenascin-C(TnC A1) and fibroblast associated protein (FAP); cytokine receptors, such as epidermal growth factor receptor (EGFR), EGFR variant III (EGFRvIII), TFGβ-R or components thereof such as endoglin; a major histocompatibility complex (MHC) molecule; a virus-specific surface antigen such as an HIV-specific antigen (such as HIV gp120); an EBV-specific antigen, a CMV-specific antigen, a HPV-specific antigen, a Lassa virus-specific antigen, an Influenza virus-specific antigen as well as any derivate or variant of these surface antigens.

[0161] In some embodiments, the present disclosure provides modified immune effector cells comprising reduced expression and/or function of SOCS1 and PTPN2 or a gene-regulating system capable of reducing the expression and/or function of SOCS1 and PTPN2 and further comprising a CAR or recombinant TCR expressed on the cell surface. In some embodiments, the modified immune effector cells comprise reduced expression and/or function of SOCS1 and PTPN2 or a gene-regulating system capable of reducing the expression and/or function of SOCS1 and PTPN2 and further comprising a recombinant expression vector encoding a CAR or a recombinant TCR.

[0162] In some embodiments, the present disclosure provides modified immune effector cells comprising reduced expression and/or function of SOCS1 and ZC3H12A or a gene-regulating system capable of reducing the expression and/or function of SOCS1 and ZC3H12A and further comprising a CAR or recombinant TCR expressed on the cell surface. In some embodiments, the modified immune effector cells comprise reduced expression and/or function of SOCS1 and ZC3H12A or a gene-regulating system capable of reducing the expression and/or function of SOCS1 and ZC3H12A and further comprising a recombinant expression vector encoding a CAR or a recombinant TCR.

[0163] In some embodiments, the present disclosure provides modified immune effector cells comprising reduced expression and/or function of PTPN2 and ZC3H12A or a gene-regulating system capable of reducing the expression and/or function of PTPN2 and ZC3H12A and further comprising a CAR or recombinant TCR expressed on the cell surface. In some embodiments, the modified immune effector cells comprise reduced expression and/or function of PTPN2 and ZC3H12A or a gene-regulating system capable of reducing the expression and/or function of PTPN2 and ZC3H12A and further comprising a recombinant expression vector encoding a CAR or a recombinant TCR.

[0164] In some embodiments, the present disclosure provides modified immune effector cells comprising reduced expression and/or function of SOCS1 and PTPN2 or a gene-regulating system capable of reducing the expression and/or function of SOCS1 and PTPN2, wherein the immune effector cell is a TIL. In some embodiments, the present disclosure provides modified immune effector cells comprising reduced expression and/or function of SOCS1 and ZC3H12A or a gene-regulating system capable of reducing the expression and/or function of SOCS1 and ZC3H12A, wherein the immune effector cell is a TIL. In some embodiments, the present disclosure provides modified immune effector cells comprising reduced expression and/or function of PTPN2 and ZC3H12A or a gene-regulating system capable of reducing the expression and/or function of PTPN2 and ZC3H12A, wherein the immune effector cell is a TIL.

### A. Effector Functions

[0165] In some embodiments, the modified immune effector cells described herein comprise reduced expression and/or function (or a gene-regulating system capable of reducing the expression and/or function) of two or more endogenous target genes selected from SOCS1, PTPN2, and ZC3H12A and demonstrate an increase in one or more immune cell effector functions. Herein, the term “effector function” refers to functions of an immune cell related to the generation, maintenance, and/or enhancement of an immune response against a target cell or target antigen. In some embodiments, the modified immune effector cells described herein demonstrate one or more of the following characteristics compared to an unmodified immune effector cell: increased infiltration or migration in to a tumor, increased proliferation, increased or prolonged cell viability, increased resistance to inhibitory factors in the surrounding microenvironment such that the activation state of the cell is prolonged or increased, increased production of pro-inflammatory immune factors (e.g., pro-inflammatory cytokines, chemokines, and/or enzymes), increased cytotoxicity, and/or increased resistance to exhaustion.

[0166] In some embodiments, the modified immune effector cells described herein demonstrate increased infiltration into a tumor compared to an unmodified immune effector cell. In some embodiments, increased tumor infiltration by modified immune effector cells refers to an increase the number of modified immune effector cells infiltrating into a tumor during a given period of time compared to the number of unmodified immune effector cells that infiltrate into a tumor during the same period of time. In some embodiments, the modified immune effector cells demonstrate a 1.1, 1.2, 1.3, 1.4, 1.5, 1.6, 1.7, 1.8, 1.9, 2, 2.5, 3, 3.5, 4, 4.5, 5, 6, 7, 8, 9, 10, 15, 20, 25, 30, 35, 40, 45, 50, 60, 70, 80, 90, 100, or more fold increase in tumor infiltration compared to an unmodified immune cell. Tumor infiltration can be measured by isolating one or more tumors from a subject and assessing the number of modified immune cells in the sample by flow cytometry, immunohistochemistry, and/or immunofluorescence.

[0167] In some embodiments, the modified immune effector cells described herein demonstrate an increase in cell proliferation compared to an unmodified immune effector cell. In these embodiments, the result is an increase in the number of modified immune effector cells present compared to unmodified immune effector cells after a given period of time. For example, in some embodiments, modified immune effector cells demonstrate increased rates of proliferation compared to unmodified immune effector cells, wherein the modified immune effector cells divide at a more rapid rate than unmodified immune effector cells. In some embodiments, the modified immune effector cells demonstrate a 1.1, 1.2, 1.3, 1.4, 1.5, 1.6, 1.7, 1.8, 1.9, 2, 2.5, 3, 3.5, 4, 4.5, 5, 6, 7, 8, 9, 10, 15, 20, 25, 30, 35, 40, 45, 50, 60, 70, 80, 90, 100, or more fold increase in the rate of proliferation compared to an unmodified immune cell. In some embodiments, modified immune effector cells demonstrate prolonged periods of proliferation compared to unmodified immune effector cells, wherein the modified immune effector cells and unmodified immune effector cells divide at similar rates, but wherein the modified immune effector cells maintain the proliferative state for a longer period of time. In some embodiments, the modified immune effector cells maintain a proliferative state for 1.1, 1.2, 1.3, 1.4, 1.5, 1.6, 1.7, 1.8, 1.9, 2, 2.5, 3, 3.5, 4, 4.5, 5, 6, 7, 8, 9, 10, 15, 20, 25, 30, 35, 40, 45, 50, 60, 70, 80, 90, 100, or more times longer than an unmodified immune cell.

[0168] In some embodiments, the modified immune effector cells described herein demonstrate increased or prolonged cell viability compared to an unmodified immune effector cell. In such embodiments, the result is an increase in the number of modified immune effector cells or present compared to unmodified immune effector cells after a given period of time. For example, in some embodiments, modified immune effector cells described herein remain viable and persist for 1.1, 1.2, 1.3, 1.4, 1.5, 1.6, 1.7, 1.8, 1.9, 2, 2.5, 3, 3.5, 4, 4.5, 5, 6, 7, 8, 9, 10, 15, 20, 25, 30, 35, 40, 45, 50, 60, 70, 80, 90, 100, or more times longer than an unmodified immune cell.

[0169] In some embodiments, the modified immune effector cells described herein demonstrate increased resistance to inhibitory factors compared to an unmodified immune effector cell. Exemplary inhibitory factors include signaling by immune checkpoint molecules (e.g., PD1, PDL1, CTLA4, LAG3, IDO) and/or inhibitory cytokines (e.g., IL-10, TGFβ).

[0170] In some embodiments, the modified T cells described herein demonstrate increased resistance to T cell exhaustion compared to an unmodified T cell. T cell exhaustion is a state of antigen-specific T cell dysfunction characterized by decreased effector function and leading to subsequent deletion of the antigen-specific T cells. In some embodiments, exhausted T cells lack the ability to proliferate in response to antigen, demonstrate decreased cytokine production, and/or demonstrate decreased cytotoxicity against target cells such as tumor cells. In some embodiments, exhausted T cells are identified by altered expression of cell surface markers and transcription factors, such as decreased cell surface expression of CD122 and CD127; increased expression of inhibitory cell surface markers such as PD1, LAG3, CD244, CD160, TIM3, and/or CTLA4; and/or increased expression of transcription factors such as Blimp1, NFAT, and/or BATF. In some embodiments, exhausted T cells demonstrate altered sensitivity cytokine signaling, such as increased sensitivity to TGFβ signaling and/or decreased sensitivity to IL-7 and IL-15 signaling. T cell exhaustion can be determined, for example, by co-culturing the T cells with a population of target cells and measuring T cell proliferation, cytokine production, and/or lysis of the target cells. In some embodiments, the modified immune effector cells described herein are co-cultured with a population of target cells (e.g., autologous tumor cells or cell lines that have been engineered to express a target tumor antigen) and effector cell proliferation, cytokine production, and/or target cell lysis is measured. These results are then compared to the results obtained from co-culture of target cells with a control population of immune cells (such as unmodified immune effector cells or immune effector cells that have a control modification).

[0171] In some embodiments, resistance to T cell exhaustion is demonstrated by increased production of one or more cytokines (e.g., IFNγ, TNFα, or IL-2) from the modified immune effector cells compared to the cytokine production observed from the control population of immune cells. In some embodiments, a 1.1, 1.2, 1.3, 1.4, 1.5, 1.6, 1.7, 1.8, 1.9, 2.0, 2.5, 3.0, 3.5, 4.0, 4.5, 5, 6, 7, 8, 9, 10, 15, 20, 30, 35, 40, 45, 50, 60, 70, 80, 90, 100 or more fold increase in cytokine production from the modified immune effector cells compared to the cytokine production from the control population of immune cells is indicative of an increased resistance to T cell exhaustion. In some embodiments, resistance to T cell exhaustion is demonstrated by increased proliferation of the modified immune effector cells compared to the proliferation observed from the control population of immune cells. In some embodiments, a 1.1, 1.2, 1.3, 1.4, 1.5, 1.6, 1.7, 1.8, 1.9, 2.0, 2.5, 3.0, 3.5, 4.0, 4.5, 5, 6, 7, 8, 9, 10, 15, 20, 30, 35, 40, 45, 50, 60, 70, 80, 90, 100 or more fold increase in proliferation of the modified immune effector cells compared to the proliferation of the control population of immune cells is indicative of an increased resistance to T cell exhaustion. In some embodiments, resistance to T cell exhaustion is demonstrated by increased target cell lysis by the modified immune effector cells compared to the target cell lysis observed by the control population of immune cells. In some embodiments, a 1.1, 1.2, 1.3, 1.4, 1.5, 1.6, 1.7, 1.8, 1.9, 2.0, 2.5, 3.0, 3.5, 4.0, 4.5, 5, 6, 7, 8, 9, 10, 15, 20, 30, 35, 40, 45, 50, 60, 70, 80, 90, 100 or more fold increase in target cell lysis by the modified immune effector cells compared to the target cell lysis by the control population of immune cells is indicative of an increased resistance to T cell exhaustion.

[0172] In some embodiments, exhaustion of the modified immune effector cells compared to control populations of immune cells is measured during the in vitro or ex vivo manufacturing process. For example, in some embodiments, TILs isolated from tumor fragments are modified according to the methods described herein and then expanded in one or more rounds of expansion to produce a population of modified TILs. In such embodiments, the exhaustion of the modified TILs can be determined immediately after harvest and prior to a first round of expansion, after the first round of expansion but prior to a second round of expansion, and/or after the first and the second round of expansion. In some embodiments, exhaustion of the modified immune effector cells compared to control populations of immune cells is measured at one or more time points after transfer of the modified immune effector cells into a subject. For example, in some embodiments, the modified cells are produced according to the methods described herein and administered to a subject. Samples can then be taken from the subject at various time points after the transfer to determine exhaustion of the modified immune effector cells in vivo over time.

[0173] In some embodiments, the modified immune effector cells described herein demonstrate increased expression or production of pro-inflammatory immune factors compared to an unmodified immune effector cell. Examples of pro-inflammatory immune factors include cytolytic factors, such as granzyme B, perforin, and granulysin; and pro-inflammatory cytokines such as interferons (IFNα, IFNβ, IFNγ), TNFα, IL-10, IL-12, IL-2, IL-17, CXCL8, and/or IL-6.

[0174] In some embodiments, the modified immune effector cells described herein demonstrate increased cytotoxicity against a target cell compared to an unmodified immune effector cell. In some embodiments, the modified immune effector cells demonstrate a 1, 2, 3, 4, 5, 6, 7, 8, 9, 10, 20, 30, 40, 50, 60, 70, 80, 90, 100, or more fold increase in cytotoxicity against a target cell compared to an unmodified immune cell.

In some embodiments, the modified immune effector cells described herein produce a TIL population that persists with both the central memory phenotype T_{cm} cells) and effector memory phenotype (Tₑₘ cells). These phenotypes provide durable anti-tumor memory and invoke eptitope spreading.

[0175] Assays for measuring immune effector function are known in the art. For example, tumor infiltration can be measured by isolating tumors from a subject and determining the total number and/or phenotype of the lymphocytes present in the tumor by flow cytometry, immunohistochemistry, and/or immunofluorescence. Cell-surface receptor expression can be determined by flow cytometry, immunohistochemistry, immunofluorescence, Western blot, and/or qPCR. Cytokine and chemokine expression and production can be measured by flow cytometry, immunohistochemistry, immunofluorescence, Western blot, ELISA, and/or qPCR. Responsiveness or sensitivity to extracellular stimuli (e.g., cytokines, inhibitory ligands, or antigen) can be measured by assaying cellular proliferation and/or activation of downstream signaling pathways (e.g., phosphorylation of downstream signaling intermediates) in response to the stimuli. Cytotoxicity can be measured by target-cell lysis assays known in the art, including in vitro or ex vivo co-culture of the modified immune effector cells with target cells and in vivo murine tumor models, such as those described throughout the Examples.

### B. Regulation of Endogenous Pathways and Genes

[0176] In some embodiments, the modified immune effector cells described herein demonstrate a reduced expression and/or function of two or more endogenous target genes selected from SOCS1, PTPN2, and ZC3H12A. Further details on the endogenous target genes are provided below in Table 2. In such embodiments, the reduced expression or function of the two or more endogenous target genes enhances one or more effector functions of the immune cell.

[0177] In some embodiments, the modified effector cells described herein comprise reduced expression and/or function of the Suppressors of cytokine signaling SOCS 1 (SOCS1) gene. The SOCS1 protein comprises C-terminal SOCS box motifs, an SH2-domain, an ESS domain, and an N-terminal KIR domain. The 12 amino-acid residues called the kinase inhibitory region (KIR) has been found to be critical in the ability of SOCS1 to negatively regulate JAK1, TYK2 and JAK2 tyrosine kinase function.

[0178] In some embodiments, the modified effector cells described herein comprise reduced expression and/or function of the PTPN2 gene. The protein tyrosine phosphatase family (PTP) dephosphorylate phospho-tyrosine residues by their phosphatase catalytic domain. PTPN2 functions as a brake on both TCRs and cytokines, which signal through JAK/STAT signaling complexes, and thus serves as a checkpoint on both Signals 1 and 3. Following T Cell engagement with antigen and activation of the TCR, positive signals are amplified downstream by the kinases Lck and Fyn by phosphorylation of tyrosine residues. PTPN2 serves to dephosphorylate both Lck and Fyn and thus attenuate TCR signaling. In addition, following T cell encounter with cytokines and signaling through common γ chain receptor complex, which transmit positive signals though JAK/STAT signaling, PTPN2 also attenuates by dephosphorylation of STAT1 and STAT3. The sum functional impact of PTPN2 loss on T cell function is a lowering of the activation threshold needed for fulminant T cell activation through the TCR, and a hypersensitivity to growth and differentiation-enhancing cytokines The protein tyrosine phosphatase family (PTP) dephosphorylate phospho-tyrosine residues by their phosphatase catalytic domain. PTPN2 functions as a brake on both TCRs and cytokines, which signal through JAK/STAT signaling complexes, and thus serves as a checkpoint on both Signals 1 and 3. Following T Cell engagement with antigen and activation of the TCR, positive signals are amplified downstream by the kinases Lck and Fyn by phosphorylation of tyrosine residues. PTPN2 serves to dephosphorylate both Lck and Fyn and thus attenuate TCR signaling. In addition, following T cell encounter with cytokines and signaling through common γc chain receptor complex, which transmit positive signals though JAK/STAT signaling, PTPN2 also attenuates by dephosphorylation of STAT1 and STAT3. The sum functional impact of PTPN2 loss on T cell function is a lowering of the activation threshold needed for fulminant T cell activation through the TCR, and a hypersensitivity to growth and differentiation-enhancing cytokines.

[0179] In addition, in genetically engineered mouse (GEM) models, deletion of PTPN2 in the whole mouse increases cytokine levels, lymphocytic infiltration in nonlymphoid tissues and early signs of rheumatoid arthritis-like symptoms; these mice do not survive past 5 weeks of age. Thus, PTPN2 has been identified as critical for postnatal development in mice. Consistent with this autoimmune phenotype, deletion of Ptpn2 in the T cell lineage from birth also results in an increase in lymphocytic infiltration in non-lymphoid tissues. Importantly, an inducible knockout of Ptpn2 in adult mouse T cells did not result in any autoimmune manifestations of its role in autoimmunity, Ptpn2 deletion was identified to associate with a small percentage of T cell acute lymphoblastic leukemia in humans (ALL); and to enhance skin tumor development in a two-stage chemically-induced carcinogenicity mouse model. These data have led some to postulate that PTPN2 may be a tumor suppressor protein.

[0180] In some embodiments, the modified effector cells described herein comprise reduced expression and/or function of the ZC3H12A gene. ZC3H12A, also referred to as MCPIP1 and REGNASE-1, is an RNase that possesses a RNase domain just upstream of a CCCH-type zinc-finger motif. Through its nuclease activity, ZC3H12A targets and destabilizes the mRNAs of transcripts, such as IL-6, by binding a conserved stem loop structure within the 3′ UTR of these genes. In T cells, ZC3H12A controls the transcript levels of a number of pro-inflammatory genes, including c-Rel, OX40 and IL-2. REGNASE-lactivation is transient and is subject to negative feedback mechanisms including proteasome-mediated degradation or mucosa-associated lymphoid tissue 1 (MALT1) mediated cleavage. The major function of REGNASE-1 is promoting mRNA decay via its ribonuclease activity by specifically targeting a subset of genes in different cell types. In monocytes, REGNASE-1 downregulates IL-6 and IL-12B mRNAs, thus mitigating inflammation, whereas in T cells, it restricts T-cell activation by targeting c-Rel, Ox40 and IL-2 transcripts. In cancer cells, REGNASE-1promotes apoptosis by inhibiting anti-apoptotic genes including BCL2L1, BCL2A1, RELB and BCL3.

TABLE 2
Endogenous target genes

| | | Human | Human | Murine | Murine |
|---|---|---|---|---|---|
| Gene | | UniProt | NCBI | UniProt | NCBI |
| Symbol | Gene Name | Ref. | Ref | Ref. | Ref |
| SOCS1 | suppressor of | O15524 | 8651 | O35716 | 12703 |
| | cytokine | | (SEQ ID | | (SEQ ID |
| | signaling 1 | | NO: 1) | | NO: 2) |
| PTPN2 | protein | P17706 | 5771 | Q06180 | 19255 |
| | tyrosine | | (SEQ ID | | (SEQ ID |
| | phosphatase, | | NO: 3) | | NO: 4) |
| | non-receptor | | | | |
| | type 2 | | | | |
| ZC3H12A | Endoribo- | Q5D1E8 | 80149 | Q5D1E7 | 230738 |
| | nuclease | | (SEQ ID | | (SEQ ID |
| | ZC3H12A | | NO: 5) | | NO: 6) |
| CBLB | Cbl proto- | Q13191 | 868 | Q3TTA7 | 208650 |
| | oncogene B | | (SEQ ID | | (SEQ ID |
| | | | NO: 823) | | NO: 824) |

[0181] In some embodiments, the modified immune effector cells comprise reduced expression and/or function of SOCS1 and reduced expression and/or function of PTPN2. In some embodiments, the modified immune effector cells comprise reduced expression and/or function of SOCS1 and reduced expression and/or function of ZC3H12A. In some embodiments, the modified immune effector cells comprise reduced expression and/or function of PTPN2 and reduced expression and/or function of ZC3H12A. In some embodiments, the modified immune effector cells comprise reduced expression and/or function of at least two genes endogenous target genes selected from SOCS1, PTPN2, and ZC3H12A and further comprise reduced expression and/or function of CBLB.

### III. Gene-Regulating Systems

[0182] Herein, the term “gene-regulating system” refers to a protein, nucleic acid, or combination thereof that is capable of modifying an endogenous target DNA sequence when introduced into a cell, thereby regulating the expression or function of the encoded gene product. Numerous gene editing systems suitable for use in the methods of the present disclosure are known in the art including, but not limited to, shRNAs, siRNAs, zinc-finger nuclease systems, TALEN systems, and CRISPR/Cas systems.

[0183] As used herein, “regulate,” when used in reference to the effect of a gene-regulating system on an endogenous target gene encompasses any change in the sequence of the endogenous target gene, any change in the epigenetic state of the endogenous target gene, and/or any change in the expression or function of the protein encoded by the endogenous target gene.

[0184] In some embodiments, the gene-regulating system may mediate a change in the sequence of the endogenous target gene, for example, by introducing one or more mutations into the endogenous target sequence, such as by insertion or deletion of one or more nucleic acids in the endogenous target sequence. Exemplary mechanisms that can mediate alterations of the endogenous target sequence include, but are not limited to, non-homologous end joining (NHEJ) (e.g., classical or alternative), microhomology-mediated end joining (MMEJ), homology-directed repair (e.g., endogenous donor template mediated), SDSA (synthesis dependent strand annealing), single strand annealing or single strand invasion.

[0185] In some embodiments, the gene-regulating system may mediate a change in the epigenetic state of the endogenous target sequence. For example, in some embodiments, the gene-regulating system may mediate covalent modifications of the endogenous target gene DNA (e.g., cytosine methylation and hydroxymethylation) or of associated histone proteins (e.g. lysine acetylation, lysine and arginine methylation, serine and threonine phosphorylation, and lysine ubiquitination and sumoylation).

[0186] In some embodiments, the gene-regulating system may mediate a change in the expression of the protein encoded by the endogenous target gene. In such embodiments, the gene-regulating system may regulate the expression of the encoded protein by modifications of the endogenous target DNA sequence, or by acting on the mRNA product encoded by the DNA sequence. In some embodiments, the gene-regulating system may result in the expression of a modified endogenous protein. In such embodiments, the modifications to the endogenous DNA sequence mediated by the gene-regulating system result in the expression of an endogenous protein demonstrating a reduced function as compared to the corresponding endogenous protein in an unmodified immune effector cell. In such embodiments, the expression level of the modified endogenous protein may be increased, decreased or may be the same, or substantially similar to, the expression level of the corresponding endogenous protein in an unmodified immune cell.

### A. Nucleic Acid-Based Gene-Regulating Systems

[0187] In some embodiments, the present disclosure provides nucleic acid gene-regulating systems comprising two or more nucleic acids capable of reducing the expression and/or function of at least two endogenous genes selected from SOCS1, PTPN2, and ZC3H12A. In some embodiments, the present disclosure provides modified immune effector cells comprising such gene-regulating systems. As used herein, a nucleic acid-based gene-regulating system is a system comprising one or more nucleic acid molecules that is capable of regulating the expression of an endogenous target gene without the requirement for an exogenous protein. In some embodiments, the nucleic acid-based gene-regulating system comprises an RNA interference molecule or antisense RNA molecule that is complementary to a target nucleic acid sequence.

[0188] An “antisense RNA molecule” refers to an RNA molecule, regardless of length, that is complementary to an mRNA transcript. Antisense RNA molecules refer to single stranded RNA molecules that can be introduced to a cell, tissue, or subject and result in decreased expression of an endogenous target gene product through mechanisms that do not rely on endogenous gene silencing pathways, but rather rely on RNaseH-mediated degradation of the target mRNA transcript. In some embodiments, an antisense nucleic acid comprises a modified backbone, for example, phosphorothioate, phosphorodithioate, or others known in the art, or may comprise non-natural internucleoside linkages. In some embodiments, an antisense nucleic acid can comprise locked nucleic acids (LNA).

[0189] “RNA interference molecule” as used herein refers to an RNA polynucleotide that mediates the decreased the expression of an endogenous target gene product by degradation of a target mRNA through endogenous gene silencing pathways (e.g., Dicer and RNA-induced silencing complex (RISC)). Exemplary RNA interference agents include micro RNAs (also referred to herein as “miRNAs”), short hair-pin RNAs (shRNAs), small interfering RNAs (siRNAs), RNA aptamers, and morpholinos.

[0190] In some embodiments, the nucleic acid-based gene-regulating system comprises one or more miRNAs. miRNAs are naturally occurring, small non-coding RNA molecules of about 21-25 nucleotides in length. miRNAs are at least partially complementary to one or more target mRNA molecules. miRNAs can downregulate (e.g., decrease) expression of an endogenous target gene product through translational repression, cleavage of the mRNA, and/or deadenylation.

[0191] In some embodiments, the nucleic acid-based gene-regulating system comprises one or more shRNAs. shRNAs are single stranded RNA molecules of about 50-70 nucleotides in length that form stem-loop structures and result in degradation of complementary mRNA sequences. shRNAs can be cloned in plasmids or in non-replicating recombinant viral vectors to be introduced intracellularly and result in the integration of the shRNA-encoding sequence into the genome. As such, an shRNA can provide stable and consistent repression of endogenous target gene translation and expression.

[0192] In some embodiments, nucleic acid-based gene-regulating system comprises one or more siRNAs. siRNAs refer to double stranded RNA molecules typically about 21-23 nucleotides in length. The siRNA associates with a multi protein complex called the RNA-induced silencing complex (RISC), during which the “passenger” sense strand is enzymatically cleaved. The antisense “guide” strand contained in the activated RISC then guides the RISC to the corresponding mRNA because of sequence homology and the same nuclease cuts the target mRNA, resulting in specific gene silencing. Optimally, an siRNA is 18, 19, 20, 21, 22, 23 or 24 nucleotides in length and has a 2 base overhang at its 3′ end. siRNAs can be introduced to an individual cell and/or culture system and result in the degradation of target mRNA sequences. siRNAs and shRNAs are further described in Fire et al., Nature, 391:19, 1998 and U.S. Pat. Nos. 7,732,417; 8,202,846; and 8,383,599.

[0193] In some embodiments, the nucleic acid-based gene-regulating system comprises one or more morpholinos. “Morpholino” as used herein refers to a modified nucleic acid oligomer wherein standard nucleic acid bases are bound to morpholine rings and are linked through phosphorodiamidate linkages. Similar to siRNA and shRNA, morpholinos bind to complementary mRNA sequences. However, morpholinos function through steric-inhibition of mRNA translation and alteration of mRNA splicing rather than targeting complementary mRNA sequences for degradation.

[0194] In some embodiments, the nucleic acid-based gene-regulating system comprises a nucleic acid molecule (e.g., an siRNA, an shRNA, an RNA aptamer, or a morpholino) that binds to a target RNA sequence that is at least 90% identical to a RNA sequence encoded by a DNA sequence defined by a set of genomic coordinates shown in Tables 3-8. Throughout this application, the referenced genomic coordinates are based on genomic annotations in the GRCh38 (also referred to as hg38) assembly of the human genome from the Genome Reference Consortium, available at the National Center for Biotechnology Information website. Tools and methods for converting genomic coordinates between one assembly and another are known in the art and can be used to convert the genomic coordinates provided herein to the corresponding coordinates in another assembly of the human genome, including conversion to an earlier assembly generated by the same institution or using the same algorithm (e.g., from GRCh38 to GRCh37), and conversion an assembly generated by a different institution or algorithm (e.g., from GRCh38 to NCBI33, generated by the International Human Genome Sequencing Consortium). Available methods and tools known in the art include, but are not limited to, NCBI Genome Remapping Service, available at the National Center for Biotechnology Information website, UCSC LiftOver, available at the UCSC Genome Brower website, and Assembly Converter, available at the Ensembl.org web site.

[0195] In some embodiments, the nucleic acid-based gene-regulating system comprises at least two nucleic acid molecules (e.g., an siRNA, an shRNA, an RNA aptamer, or a morpholino), wherein at least one nucleic acid molecule is a SOCS1-targeting nucleic acid molecule. In some embodiments, the at least one SOCS1-targeting nucleic acid molecule binds to a target RNA sequence that is at least 95%, 96%, 97%, 98%, or 99% identical to an RNA sequence encoded by the SOCS1 gene (SEQ ID NO: 1) or the Socs1 gene (SEQ ID NO: 2). In some embodiments, the at least one SOCS1-targeting nucleic acid molecule binds to a target RNA sequence that is 100% identical to an RNA sequence encoded by the SOCS1 gene (SEQ ID NO: 1) or the Socs1 gene (SEQ ID NO: 2). In some embodiments, the least one SOCS1-targeting nucleic acid molecule is an siRNA or an shRNA molecule. In some embodiments, the at least one SOCS1-targeting siRNA or an shRNA molecule binds to a target RNA sequence that is at least 95%, 96%, 97%, 98%, or 99% identical to an RNA sequence encoded by the SOCS1 gene (SEQ ID NO: 1) or the Socs1 gene (SEQ ID NO: 2). In some embodiments, the at least one SOCS1-targeting siRNA or an shRNA molecule binds to a target RNA sequence that is 100% identical to an RNA sequence encoded by the SOCS1 gene (SEQ ID NO: 1) or the Socs1 gene (SEQ ID NO: 2).

[0196] In some embodiments, the at least one SOCS1-targeting nucleic acid molecule binds to a target RNA sequence that is at least 95%, 96%, 97%, 98%, or 99% identical to a RNA sequence encoded by a DNA sequence defined by a set of genomic coordinates shown in Table 3 or Table 4. In some embodiments, the at least one SOCS1-targeting nucleic acid molecule binds to a target RNA sequence that is 100% identical to a RNA sequence encoded by a DNA sequence defined by a set of genomic coordinates shown in Table 3 or Table 4. In some embodiments, the at least one SOCS1-targeting nucleic acid molecule binds to a target RNA sequence that is at least 95%, 96%, 97%, 98%, or 99% identical to an RNA sequence encoded by one of SEQ ID NOs: 7-151. In some embodiments, the at least one SOCS1-targeting nucleic acid molecule binds to a target RNA sequence that is 100% identical to an RNA sequence encoded by one of SEQ ID NOs: 7-151.

[0197] In some embodiments, the at least one SOCS1-targeting nucleic acid molecule is a SOCS1-targeting shRNA or siRNA molecule. In some embodiments, the at least one SOCS1-targeting shRNA or siRNA molecule binds to a target RNA sequence that is at least 95%, 96%, 97%, 98%, or 99% identical to a RNA sequence encoded by a DNA sequence defined by a set of genomic coordinates shown in Table 3 or Table 4. In some embodiments, the at least one SOCS1-targeting shRNA or siRNA molecule binds to a target RNA sequence that is 100% identical to a RNA sequence encoded by a DNA sequence defined by a set of genomic coordinates shown in Table 3 or Table 4. In some embodiments, the at least one SOCS1-targeting shRNA or siRNA molecule binds to a target RNA sequence that is at least 95%, 96%, 97%, 98%, or 99% identical to an RNA sequence encoded by one of SEQ ID NOs: 7-151. In some embodiments, the at least one SOCS1-targeting shRNA or siRNA molecule binds to a target RNA sequence that is 100% identical to an RNA sequence encoded by one of SEQ ID NOs: 7-151.

[0198] In some embodiments, the nucleic acid-based gene-regulating system comprises at least one SOCS1-targeting siRNA molecule or shRNA molecule selected from those known in the art. For example, in some embodiments, the SOCS1-targeting nucleic acid molecule is a SOCS1-targeting shRNA molecule that binds to a target sequence selected from SEQ ID NOs: 152-171 shown in Table A (See U.S. Pat. No. 9,944,931). In some embodiments, the SOCS1-targeting shRNA molecule is encoded by a nucleic acid sequence selected from SEQ ID NOs: 172-174 shown in Table A (See U.S. Pat. No. 8,324,369). In some embodiments, the SOCS1-targeting nucleic acid molecule is a SOCS1-targeting siRNA comprising a nucleic acid sequence selected from SEQ ID NOs: 175-184 shown in Table B (See International PCT Publication Nos. WO 2017120996; WO 2018137295; WO 2017120998; and WO 2018137293).

TABLE 3
SOCS1 Human Genome Coordinates

| Target | Coordinates |
|---|---|
| SOCS1 | chr16: 11255187-11255206 |
| SOCS1 | chr16: 11255238-11255257 |
| SOCS1 | chr16: 11255058-11255077 |
| SOCS1 | chr16: 11255158-11255177 |
| SOCS1 | chr16: 11255239-11255258 |
| SOCS1 | chr16: 11255237-11255256 |
| SOCS1 | chr16: 11255019-11255038 |
| SOCS1 | chr16: 11255066-11255085 |
| SOCS1 | chr16: 11255238-11255257 |
| SOCS1 | chr16: 11255168-11255187 |
| SOCS1 | chr16: 11255079-11255098 |
| SOCS1 | chr16: 11255287-11255306 |
| SOCS1 | chr16: 11255249-11255268 |
| SOCS1 | chr16: 11255186-11255205 |
| SOCS1 | chr16: 11255236-11255255 |
| SOCS1 | chr16: 11255116-11255135 |
| SOCS1 | chr16: 11255070-11255089 |
| SOCS1 | chr16: 11255117-11255136 |
| SOCS1 | chr16: 11255283-11255302 |
| SOCS1 | chr16: 11255442-11255461 |
| SOCS1 | chr16: 11255209-11255228 |
| SOCS1 | chr16: 11254932-11254951 |
| SOCS1 | chr16: 11254966-11254985 |
| SOCS1 | chr16: 11254950-11254969 |
| SOCS1 | chr16: 11255049-11255068 |
| SOCS1 | chr16: 11255155-11255174 |
| SOCS1 | chr16: 11255460-11255479 |
| SOCS1 | chr16: 11255037-11255056 |
| SOCS1 | chr16: 11255154-11255173 |
| SOCS1 | chr16: 11255115-11255134 |
| SOCS1 | chr16: 11254985-11255004 |
| SOCS1 | chr16: 11255013-11255032 |
| SOCS1 | chr16: 11255016-11255035 |
| SOCS1 | chr16: 11255139-11255158 |
| SOCS1 | chr16: 11255248-11255267 |
| SOCS1 | chr16: 11255217-11255236 |
| SOCS1 | chr16: 11254994-11255013 |
| SOCS1 | chr16: 11254965-11254984 |
| SOCS1 | chr16: 11255219-11255238 |
| SOCS1 | chr16: 11255173-11255192 |
| SOCS1 | chr16: 11255210-11255229 |
| SOCS1 | chr16: 11255062-11255081 |
| SOCS1 | chr16: 11255259-11255278 |
| SOCS1 | chr16: 11255230-11255249 |
| SOCS1 | chr16: 11255084-11255103 |
| SOCS1 | chr16: 11255175-11255194 |
| SOCS1 | chr16: 11255419-11255438 |
| SOCS1 | chr16: 11254903-11254922 |
| SOCS1 | chr16: 11255089-11255108 |
| SOCS1 | chr16: 11255379-11255398 |
| SOCS1 | chr16: 11255206-11255225 |
| SOCS1 | chr16: 11255090-11255109 |
| SOCS1 | chr16: 11255208-11255227 |
| SOCS1 | chr16: 11254956-11254975 |
| SOCS1 | chr16: 11255118-11255137 |
| SOCS1 | chr16: 11254906-11254925 |
| SOCS1 | chr16: 11255167-11255186 |
| SOCS1 | chr16: 11254835-11254854 |
| SOCS1 | chr16: 11255292-11255311 |
| SOCS1 | chr16: 11255416-11255435 |
| SOCS1 | chr16: 11255136-11255155 |
| SOCS1 | chr16: 11254964-11254983 |
| SOCS1 | chr16: 11254896-11254915 |
| SOCS1 | chr16: 11254940-11254959 |
| SOCS1 | chr16: 11255349-11255368 |
| SOCS1 | chr16: 11254992-11255011 |
| SOCS1 | chr16: 11254923-11254942 |
| SOCS1 | chr16: 11255431-11255450 |
| SOCS1 | chr16: 11255463-11255482 |
| SOCS1 | chr16: 11255343-11255362 |
| SOCS1 | chr16: 11255088-11255107 |
| SOCS1 | chr16: 11254834-11254853 |
| SOCS1 | chr16: 11254922-11254941 |
| SOCS1 | chr16: 11255098-11255117 |
| SOCS1 | chr16: 11254993-11255012 |
| SOCS1 | chr16: 11254840-11254859 |
| SOCS1 | chr16: 11255400-11255419 |
| SOCS1 | chr16: 11254920-11254939 |
| SOCS1 | chr16: 11254966-11254985 |
| SOCS1 | chr16: 11254860-11254879 |
| SOCS1 | chr16: 11254980-11254999 |
| SOCS1 | chr16: 11254857-11254876 |
| SOCS1 | chr16: 11254874-11254893 |
| SOCS1 | chr16: 11255028-11255047 |
| SOCS1 | chr16: 11254956-11254975 |
| SOCS1 | chr16: 11254908-11254927 |
| SOCS1 | chr16: 11255337-11255356 |
| SOCS1 | chr16: 11254836-11254855 |
| SOCS1 | chr16: 11254842-11254861 |
| SOCS1 | chr16: 11254865-11254884 |
| SOCS1 | chr16: 11254830-11254849 |
| SOCS1 | chr16: 11255401-11255420 |
| SOCS1 | chr16: 11254864-11254883 |
| SOCS1 | chr16: 11255311-11255330 |
| SOCS1 | chr16: 11255343-11255362 |
| SOCS1 | chr16: 11255342-11255361 |
| SOCS1 | chr16: 11255272-11255291 |
| SOCS1 | chr16: 11254866-11254885 |
| SOCS1 | chr16: 11255310-11255329 |
| SOCS1 | chr16: 11255336-11255355 |
| SOCS1 | chr16: 11255416-11255435 |
| SOCS1 | chr16: 11255402-11255421 |
| SOCS1 | chr16: 11255467-11255486 |
| SOCS1 | chr16: 11254873-11254892 |
| SOCS1 | chr16: 11255265-11255284 |
| SOCS1 | chr16: 11254820-11254839 |
| SOCS1 | chr16: 11254848-11254867 |
| SOCS1 | chr16: 11255317-11255336 |
| SOCS1 | chr16: 11255351-11255370 |
| SOCS1 | chr16: 11254811-11254830 |
| SOCS1 | chr16: 11255353-11255372 |
| SOCS1 | chr16: 11255350-11255369 |
| SOCS1 | chr16: 11255309-11255328 |
| SOCS1 | chr16: 11255390-11255409 |
| SOCS1 | chr16: 11255478-11255497 |
| SOCS1 | chr16: 11255330-11255349 |
| SOCS1 | chr16: 11254875-11254894 |
| SOCS1 | chr16: 11255124-11255143 |
| SOCS1 | chr16: 11255352-11255371 |
| SOCS1 | chr16: 11254872-11254891 |
| SOCS1 | chr16: 11255331-11255350 |
| SOCS1 | chr16: 11255315-11255334 |
| SOCS1 | chr16: 11255482-11255501 |
| SOCS1 | chr16: 11254995-11255014 |
| SOCS1 | chr16: 11255316-11255335 |
| SOCS1 | chr16: 11255308-11255327 |
| SOCS1 | chr16: 11255321-11255340 |
| SOCS1 | chr16: 11255322-11255341 |
| SOCS1 | chr16: 11255330-11255349 |
| SOCS1 | chr16: 11255368-11255387 |
| SOCS1 | chr16: 11255377-11255396 |
| SOCS1 | chr16: 11255380-11255399 |

TABLE 4
Socs1 Murine Genome Coordinates

| Target | Coordinates |
|---|---|
| Socs1 | chr16: 10784479-10784498 |
| Socs1 | chr16: 10784409-10784428 |
| Socs1 | chr16: 10784456-10784475 |
| Socs1 | chr16: 10784322-10784341 |
| Socs1 | chr16: 10784548-10784567 |
| Socs1 | chr16: 10784596-10784615 |
| Socs1 | chr16: 10784264-10784283 |
| Socs1 | chr16: 10784628-10784647 |
| Socs1 | chr16: 10784526-10784545 |
| Socs1 | chr16: 10784508-10784527 |
| Socs1 | chr16: 10784565-10784584 |
| Socs1 | chr16: 10784474-10784493 |
| Socs1 | chr16: 10784293-10784312 |

TABLE A
Exemplary shRNA Target Sequences

| Sequence | SEQ ID |
|---|---|
| TTTCGAGCTGCTGGAGCACTA | 152 |
| TCGAGCTGCTGGAGCACTACG | 153 |
| TCGCCAACGGAACTGCTTCTT | 154 |
| ACTTCTGGCTGGAGACCTCAT | 155 |
| GCGAGACCTTCGACTGCCTTT | 156 |
| CGACACTCACTTCCGCACCTT | 157 |
| CTACCTGAGTTCCTTCCCCTT | 158 |
| TTCCGCTCCCACTCCGATTAC | 159 |
| TAACCCGGTACTCCGTGACTA | 160 |
| TACTCCGTGACTACCTGAGTT | 161 |
| CTTCCGCTCCCACTCCGATTA | 162 |
| GCGCGACAGTCGCCAACGGAA | 163 |
| TGGACGCCTGCGGCTTCTATT | 164 |
| CGCATCCCTCTTAACCCGGTA | 165 |
| TACATATTCCCAGTATCTTTG | 166 |
| GCGCCTTATTATTTCTTATTA | 167 |
| CCGTGACTACCTGAGTTCCTT | 168 |
| GGAGGGTCTCTGGCTTCATTT | 169 |
| TTCGCGCTCAGCGTGAAGATG | 170 |
| ATCCCTCTTAACCCGGTACTC | 171 |
| CACGCACTTCCGCACATTC | 172 |
| TTCCGTTCGCACGCCGATT | 173 |
| GAGCTTCGACTGCCTCTTC | 174 |

TABLE B
Exemplary siRNA Target Sequences

| Sequence | SEQ ID |
|---|---|
| CGCACUUCCGCACAUUCCGUUCG | 175 |
| GGGGAGGGUCUCUGGCUUUAUUU | 176 |
| CAGCAUUAACUGGGAUGCCGUGU | 177 |
| CCAGGACCUGAACUCGCACCUCC | 178 |
| UACAUAUACCCAGUAUCUUUGCA | 179 |
| GCCGACAAUGCAGUCUCCACAGC | 180 |
| CCCCUGGUUGUUGUAGCAGCUUA | 181 |
| CUGCUGUGCAGAAUCCUAUUUUA | 182 |
| UGGGAUGCCGUGUUAUUUUGUUA | 183 |
| UCGCACCUCCUACCUCUUCAUGU | 184 |

[0199] In some embodiments, the nucleic acid-based gene-regulating system comprises at least two nucleic acid molecules (e.g., an siRNA, an shRNA, an RNA aptamer, or a morpholino), wherein at least one nucleic acid molecule is a PTPN2-targeting nucleic acid molecule. In some embodiments, the at least one PTPN2-targeting nucleic acid molecule binds to a target RNA sequence that is at least 95%, 96%, 97%, 98%, or 99% identical to an RNA sequence encoded by the PTPN2 gene (SEQ ID NO: 3) or the Ptpn2 gene (SEQ ID NO: 4). In some embodiments, the at least one PTPN2-targeting nucleic acid molecule binds to a target RNA sequence that is 100% identical to an RNA sequence encoded by the PTPN2 gene (SEQ ID NO: 3) or the Ptpn2 gene (SEQ ID NO: 4). In some embodiments, the least one PTPN2-targeting nucleic acid molecule is an siRNA or an shRNA molecule. In some embodiments, the at least one PTPN2-targeting siRNA or an shRNA molecule binds to a target RNA sequence that is at least 95%, 96%, 97%, 98%, or 99% identical to an RNA sequence encoded by the PTPN2 gene (SEQ ID NO: 3) or the Ptpn2 gene (SEQ ID NO: 4). In some embodiments, the at least one PTPN2-targeting siRNA or an shRNA molecule binds to a target RNA sequence that is 100% identical to an RNA sequence encoded by the PTPN2 gene (SEQ ID NO: 3) or the Ptpn2 gene (SEQ ID NO: 4).

[0200] In some embodiments, the at least one PTPN2-targeting nucleic acid molecule binds to a target RNA sequence that is at least 95%, 96%, 97%, 98%, or 99% identical to a RNA sequence encoded by a DNA sequence defined by a set of genomic coordinates shown in Table 5 or Table 6. In some embodiments, the at least one PTPN2-targeting nucleic acid molecule binds to a target RNA sequence that is 100% identical to a RNA sequence encoded by a DNA sequence defined by a set of genomic coordinates shown in Table 5 or Table 6. In some embodiments, the at least one PTPN2-targeting nucleic acid molecule binds to a target RNA sequence that is at least 95%, 96%, 97%, 98%, or 99% identical to an RNA sequence encoded by one of SEQ ID NOs: 185-207. In some embodiments, the at least one PTPN2-targeting nucleic acid molecule binds to a target RNA sequence that is 100% identical to an RNA sequence encoded by one of SEQ ID NOs: 185-207.

[0201] In some embodiments, the at least one PTPN2-targeting nucleic acid molecule is a SOCS1-targeting shRNA or siRNA molecule. In some embodiments, the at least one PTPN2-targeting shRNA or siRNA molecule binds to a target RNA sequence that is at least 95%, 96%, 97%, 98%, or 99% identical to a RNA sequence encoded by a DNA sequence defined by a set of genomic coordinates shown in Table 5 or Table 6. In some embodiments, the at least one PTPN2-targeting shRNA or siRNA molecule binds to a target RNA sequence that is 100% identical to a RNA sequence encoded by a DNA sequence defined by a set of genomic coordinates shown in Table 5 or Table 6. In some embodiments, the at least one PTPN2-targeting shRNA or siRNA molecule binds to a target RNA sequence that is at least 95%, 96%, 97%, 98%, or 99% identical to an RNA sequence encoded by one of SEQ ID NOs: 185-207. In some embodiments, the at least one PTPN2-targeting shRNA or siRNA molecule binds to a target RNA sequence that is 100% identical to an RNA sequence encoded by one of SEQ ID NOs: 185-207.

TABLE 5
PTPN2 Human Genome Coordinates

| | |
|---|---|
| PTPN2 | Chr18: 12859218-12859237 |
| PTPN2 | Chr18: 12884109-12884128 |
| PTPN2 | Chr18: 12817227-12817246 |
| PTPN2 | Chr18: 12817234-12817253 |
| PTPN2 | Chr18: 12884091-12884110 |
| PTPN2 | Chr18: 12884121-12884140 |
| PTPN2 | Chr18: 12831010-12831029 |
| PTPN2 | Chr18: 12817208-12817227 |
| PTPN2 | Chr18: 12817158-12817177 |
| PTPN2 | Chr18: 12831016-12831035 |
| PTPN2 | Chr18: 12817228-12817247 |
| PTPN2 | Chr18: 12830964-12830983 |
| PTPN2 | Chr18: 12801972-12801991 |
| PTPN2 | Chr18: 12836818-12836837 |
| PTPN2 | Chr18: 12817215-12817234 |
| PTPN2 | Chr18: 12802018-12802037 |
| PTPN2 | Chr18: 12884116-12884135 |
| PTPN2 | Chr18: 12840739-12840758 |
| PTPN2 | Chr18: 12802004-12802023 |
| PTPN2 | Chr18: 12840767-12840786 |
| PTPN2 | Chr18: 12817197-12817216 |
| PTPN2 | Chr18: 12884108-12884127 |
| PTPN2 | Chr18: 12817221-12817240 |
| PTPN2 | Chr18: 12836820-12836839 |
| PTPN2 | Chr18: 12884124-12884143 |
| PTPN2 | Chr18: 12830996-12831015 |
| PTPN2 | Chr18: 12830942-12830961 |
| PTPN2 | Chr18: 12884112-12884131 |
| PTPN2 | Chr18: 12817193-12817212 |
| PTPN2 | Chr18: 12859205-12859224 |
| PTPN2 | Chr18: 12817202-12817221 |
| PTPN2 | Chr18: 12859216-12859235 |
| PTPN2 | Chr18: 12859215-12859234 |
| PTPN2 | Chr18: 12817201-12817220 |
| PTPN2 | Chr18: 12802134-12802153 |
| PTPN2 | Chr18: 12884075-12884094 |
| PTPN2 | Chr18: 12884115-12884134 |
| PTPN2 | Chr18: 12840757-12840776 |
| PTPN2 | Chr18: 12814205-12814224 |
| PTPN2 | Chr18: 12840777-12840796 |
| PTPN2 | Chr18: 12814277-12814296 |
| PTPN2 | Chr18: 12840746-12840765 |
| PTPN2 | Chr18: 12801989-12802008 |
| PTPN2 | Chr18: 12819237-12819256 |
| PTPN2 | Chr18: 12814348-12814367 |
| PTPN2 | Chr18: 12794428-12794447 |
| PTPN2 | Chr18: 12831005-12831024 |
| PTPN2 | Chr18: 12825890-12825909 |
| PTPN2 | Chr18: 12840723-12840742 |
| PTPN2 | Chr18: 12840747-12840766 |
| PTPN2 | Chr18: 12802068-12802087 |
| PTPN2 | Chr18: 12840716-12840735 |
| PTPN2 | Chr18: 12840773-12840792 |
| PTPN2 | Chr18: 12831012-12831031 |
| PTPN2 | Chr18: 12814240-12814259 |
| PTPN2 | Chr18: 12802130-12802149 |
| PTPN2 | Chr18: 12794454-12794473 |
| PTPN2 | Chr18: 12817208-12817227 |
| PTPN2 | Chr18: 12819226-12819245 |
| PTPN2 | Chr18: 12825889-12825908 |
| PTPN2 | Chr18: 12840782-12840801 |
| PTPN2 | Chr18: 12836812-12836831 |
| PTPN2 | Chr18: 12817298-12817317 |
| PTPN2 | Chr18: 12817324-12817343 |
| PTPN2 | Chr18: 12819268-12819287 |
| PTPN2 | Chr18: 12817303-12817322 |
| PTPN2 | Chr18: 12825927-12825946 |
| PTPN2 | Chr18: 12817220-12817239 |
| PTPN2 | Chr18: 12825901-12825920 |
| PTPN2 | Chr18: 12814222-12814241 |
| PTPN2 | Chr18: 12831000-12831019 |
| PTPN2 | Chr18: 12840738-12840757 |
| PTPN2 | Chr18: 12802057-12802076 |
| PTPN2 | Chr18: 12802069-12802088 |
| PTPN2 | Chr18: 12884123-12884142 |
| PTPN2 | Chr18: 12814294-12814313 |
| PTPN2 | Chr18: 12817283-12817302 |
| PTPN2 | Chr18: 12830945-12830964 |
| PTPN2 | Chr18: 12817284-12817303 |
| PTPN2 | Chr18: 12817256-12817275 |
| PTPN2 | Chr18: 12884062-12884081 |
| PTPN2 | Chr18: 12814295-12814314 |
| PTPN2 | Chr18: 12817313-12817332 |
| PTPN2 | Chr18: 12814255-12814274 |
| PTPN2 | Chr18: 12814253-12814272 |
| PTPN2 | Chr18: 12814257-12814276 |
| PTPN2 | Chr18: 12814256-12814275 |
| PTPN2 | Chr18: 12840753-12840772 |
| PTPN2 | Chr18: 12830957-12830976 |
| PTPN2 | Chr18: 12802093-12802112 |
| PTPN2 | Chr18: 12817333-12817352 |
| PTPN2 | Chr18: 12794479-12794498 |
| PTPN2 | Chr18: 12814223-12814242 |
| PTPN2 | Chr18: 12802089-12802108 |
| PTPN2 | Chr18: 12794463-12794482 |
| PTPN2 | Chr18: 12794436-12794455 |
| PTPN2 | Chr18: 12794416-12794435 |
| PTPN2 | Chr18: 12817235-12817254 |
| PTPN2 | Chr18: 12836793-12836812 |
| PTPN2 | Chr18: 12801986-12802005 |
| PTPN2 | Chr18: 12817165-12817184 |
| PTPN2 | Chr18: 12817179-12817198 |
| PTPN2 | Chr18: 12794425-12794444 |
| PTPN2 | Chr18: 12802146-12802165 |

TABLE 6
Ptpn2 Murine Genome Coordinates

| Target | Coordinates |
|---|---|
| Ptpn2 | Chr18: 67680998-67681017 |
| Ptpn2 | Chr18: 67677801-67677820 |
| Ptpn2 | Chr18: 67680904-67680923 |
| Ptpn2 | Chr18: 67681553-67681572 |
| Ptpn2 | Chr18: 67688965-67688984 |
| Ptpn2 | Chr18: 67680958-67680977 |
| Ptpn2 | Chr18: 67688944-67688963 |
| Ptpn2 | Chr18: 67677855-67677874 |
| Ptpn2 | Chr18: 67677734-67677753 |
| Ptpn2 | Chr18: 67680967-67680986 |
| Ptpn2 | Chr18: 67688912-67688931 |
| Ptpn2 | Chr18: 67680881-67680900 |
| Ptpn2 | Chr18: 67681529-67681548 |

[0202] In some embodiments, the nucleic acid-based gene-regulating system comprises at least two nucleic acid molecules (e.g., an siRNA, an shRNA, an RNA aptamer, or a morpholino), wherein at least one nucleic acid molecule is a ZC3H12A-targeting nucleic acid molecule. In some embodiments, the at least one ZC3H12A-targeting nucleic acid molecule binds to a target RNA sequence that is at least 95%, 96%, 97%, 98%, or 99% identical to an RNA sequence encoded by the ZC3H12A gene (SEQ ID NO: 5) or the Zc3h12a gene (SEQ ID NO: 6). In some embodiments, the at least one ZC3H12A-targeting nucleic acid molecule binds to a target RNA sequence that is 100% identical to an RNA sequence encoded by the ZC3H12A gene (SEQ ID NO: 5) or the Zc3h12a gene (SEQ ID NO: 6). In some embodiments, the least one ZC3H12A-targeting nucleic acid molecule is an siRNA or an shRNA molecule. In some embodiments, the at least one ZC3H12A-targeting siRNA or an shRNA molecule binds to a target RNA sequence that is at least 95%, 96%, 97%, 98%, or 99% identical to an RNA sequence encoded by the ZC3H12A gene (SEQ ID NO: 5) or the Zc3h12a gene (SEQ ID NO: 6). In some embodiments, the at least one ZC3H12A-targeting siRNA or an shRNA molecule binds to a target RNA sequence that is 100% identical to an RNA sequence encoded by the ZC3H12A gene (SEQ ID NO: 5) or the Zc3h12A gene (SEQ ID NO: 6).

[0203] In some embodiments, the at least one ZC3H12A-targeting nucleic acid molecule binds to a target RNA sequence that is at least 95%, 96%, 97%, 98%, or 99% identical to a RNA sequence encoded by a DNA sequence defined by a set of genomic coordinates shown in Table 7 or Table 8. In some embodiments, the at least one ZC3H12A-targeting nucleic acid molecule binds to a target RNA sequence that is 100% identical to a RNA sequence encoded by a DNA sequence defined by a set of genomic coordinates shown in Table 7 or Table 8. In some embodiments, the at least one ZC3H12A-targeting nucleic acid molecule binds to a target RNA sequence that is at least 95%, 96%, 97%, 98%, or 99% identical to an RNA sequence encoded by one of SEQ ID NOs: 208-230. In some embodiments, the at least one ZC3H12A-targeting nucleic acid molecule binds to a target RNA sequence that is 100% identical to an RNA sequence encoded by one of SEQ ID NOs: 208-230.

[0204] In some embodiments, the at least one ZC3H12A-targeting nucleic acid molecule is a SOCS1-targeting shRNA or siRNA molecule. In some embodiments, the at least one ZC3H12A-targeting shRNA or siRNA molecule binds to a target RNA sequence that is at least 95%, 96%, 97%, 98%, or 99% identical to a RNA sequence encoded by a DNA sequence defined by a set of genomic coordinates shown in Table 7 or Table 8. In some embodiments, the at least one ZC3H12A-targeting shRNA or siRNA molecule binds to a target RNA sequence that is 100% identical to a RNA sequence encoded by a DNA sequence defined by a set of genomic coordinates shown in Table 7 or Table 8. In some embodiments, the at least one ZC3H12A-targeting shRNA or siRNA molecule binds to a target RNA sequence that is at least 95%, 96%, 97%, 98%, or 99% identical to an RNA sequence encoded by one of SEQ ID NOs: 208-230. In some embodiments, the at least one ZC3H12A-targeting shRNA or siRNA molecule binds to a target RNA sequence that is 100% identical to an RNA sequence encoded by one of SEQ ID NOs: 208-230. In some embodiments, the ZC3H12A-targeting nucleic acid molecule is a ZC3H12A-targeting shRNA molecule encoded by a nucleic acid sequence selected from SEQ ID NOs: 234-237 (See Huang et al., J Biol Chem (2015) 290(34), 20782-20792). In some embodiments, the ZC3H12A-targeting nucleic acid molecule is a ZC3H12A-targeting siRNA comprising a nucleic acid sequence selected from SEQ ID NOs: 231-233 (See Liu et al., Scientific Reports (2016), 6, Article #24073 and Mino et al., Cell (2015) 161(5), 1058-1073).

TABLE 7
ZC3H12A Human Genome Coordinates

| Target | Coordinates |
|---|---|
| ZC3H12A | Chr1: 37481708-37481727 |
| ZC3H12A | Chr1: 37475808-37475827 |
| ZC3H12A | Chr1: 37475809-37475828 |
| ZC3H12A | Chr1: 37475684-37475703 |
| ZC3H12A | Chr1: 37481823-37481842 |
| ZC3H12A | Chr1: 37480415-37480434 |
| ZC3H12A | Chr1: 37475756-37475775 |
| ZC3H12A | Chr1: 37481692-37481711 |
| ZC3H12A | Chr1: 37481648-37481667 |
| ZC3H12A | Chr1: 37480284-37480303 |
| ZC3H12A | Chr1: 37481779-37481798 |
| ZC3H12A | Chr1: 37475827-37475846 |
| ZC3H12A | Chr1: 37481747-37481766 |
| ZC3H12A | Chr1: 37482445-37482464 |
| ZC3H12A | Chr1: 37475631-37475650 |
| ZC3H12A | Chr1: 37480274-37480293 |
| ZC3H12A | Chr1: 37482967-37482986 |
| ZC3H12A | Chr1: 37482922-37482941 |
| ZC3H12A | Chr1: 37480273-37480292 |
| ZC3H12A | Chr1: 37482886-37482905 |
| ZC3H12A | Chr1: 37483185-37483204 |
| ZC3H12A | Chr1: 37475817-37475836 |
| ZC3H12A | Chr1: 37483033-37483052 |
| ZC3H12A | Chr1: 37480408-37480427 |
| ZC3H12A | Chr1: 37483026-37483045 |
| ZC3H12A | Chr1: 37483463-37483482 |
| ZC3H12A | Chr1: 37480362-37480381 |
| ZC3H12A | Chr1: 37482962-37482981 |
| ZC3H12A | Chr1: 37475775-37475794 |
| ZC3H12A | Chr1: 37475509-37475528 |
| ZC3H12A | Chr1: 37475722-37475741 |
| ZC3H12A | Chr1: 37475818-37475837 |
| ZC3H12A | Chr1: 37482966-37482985 |
| ZC3H12A | Chr1: 37480388-37480407 |
| ZC3H12A | Chr1: 37483142-37483161 |
| ZC3H12A | Chr1: 37482448-37482467 |
| ZC3H12A | Chr1: 37483049-37483068 |
| ZC3H12A | Chr1: 37482905-37482924 |
| ZC3H12A | Chr1: 37482733-37482752 |
| ZC3H12A | Chr1: 37480423-37480442 |
| ZC3H12A | Chr1: 37482456-37482475 |
| ZC3H12A | Chr1: 37483551-37483570 |
| ZC3H12A | Chr1: 37481767-37481786 |
| ZC3H12A | Chr1: 37475715-37475734 |
| ZC3H12A | Chr1: 37483377-37483396 |
| ZC3H12A | Chr1: 37475593-37475612 |
| ZC3H12A | Chr1: 37475875-37475894 |
| ZC3H12A | Chr1: 37475534-37475553 |
| ZC3H12A | Chr1: 37482764-37482783 |
| ZC3H12A | Chr1: 37475869-37475888 |
| ZC3H12A | Chr1: 37483437-37483456 |
| ZC3H12A | Chr1: 37475598-37475617 |
| ZC3H12A | Chr1: 37482438-37482457 |
| ZC3H12A | Chr1: 37483257-37483276 |
| ZC3H12A | Chr1: 37483263-37483282 |
| ZC3H12A | Chr1: 37482545-37482564 |
| ZC3H12A | Chr1: 37483015-37483034 |
| ZC3H12A | Chr1: 37481595-37481614 |
| ZC3H12A | Chr1: 37482923-37482942 |
| ZC3H12A | Chr1: 37483143-37483162 |
| ZC3H12A | Chr1: 37482348-37482367 |
| ZC3H12A | Chr1: 37483018-37483037 |
| ZC3H12A | Chr1: 37482612-37482631 |
| ZC3H12A | Chr1: 37475613-37475632 |
| ZC3H12A | Chr1: 37475563-37475582 |
| ZC3H12A | Chr1: 37475535-37475554 |
| ZC3H12A | Chr1: 37482843-37482862 |
| ZC3H12A | Chr1: 37480424-37480443 |
| ZC3H12A | Chr1: 37482606-37482625 |
| ZC3H12A | Chr1: 37483098-37483117 |
| ZC3H12A | Chr1: 37483508-37483527 |
| ZC3H12A | Chr1: 37483559-37483578 |
| ZC3H12A | Chr1: 37483256-37483275 |
| ZC3H12A | Chr1: 37475936-37475955 |
| ZC3H12A | Chr1: 37475607-37475626 |
| ZC3H12A | Chr1: 37475809-37475828 |
| ZC3H12A | Chr1: 37483186-37483205 |
| ZC3H12A | Chr1: 37481747-37481766 |
| ZC3H12A | Chr1: 37482734-37482753 |
| ZC3H12A | Chr1: 37483278-37483297 |
| ZC3H12A | Chr1: 37482332-37482351 |
| ZC3H12A | Chr1: 37483109-37483128 |
| ZC3H12A | Chr1: 37475633-37475652 |
| ZC3H12A | Chr1: 37482591-37482610 |
| ZC3H12A | Chr1: 37483271-37483290 |
| ZC3H12A | Chr1: 37483603-37483622 |
| ZC3H12A | Chr1: 37482504-37482523 |
| ZC3H12A | Chr1: 37483252-37483271 |
| ZC3H12A | Chr1: 37483119-37483138 |
| ZC3H12A | Chr1: 37482343-37482362 |
| ZC3H12A | Chr1: 37483144-37483163 |
| ZC3H12A | Chr1: 37483213-37483232 |
| ZC3H12A | Chr1: 37482981-37483000 |
| ZC3H12A | Chr1: 37482789-37482808 |
| ZC3H12A | Chr1: 37483159-37483178 |
| ZC3H12A | Chr1: 37482349-37482368 |
| ZC3H12A | Chr1: 37483602-37483621 |
| ZC3H12A | Chr1: 37481596-37481615 |
| ZC3H12A | Chr1: 37482537-37482556 |
| ZC3H12A | Chr1: 37482370-37482389 |
| ZC3H12A | Chr1: 37475546-37475565 |
| ZC3H12A | Chr1: 37482598-37482617 |
| ZC3H12A | Chr1: 37483146-37483165 |
| ZC3H12A | Chr1: 37475812-37475831 |
| ZC3H12A | Chr1: 37483400-37483419 |
| ZC3H12A | Chr1: 37475703-37475722 |
| ZC3H12A | Chr1: 37483418-37483437 |
| ZC3H12A | Chr1: 37480284-37480303 |
| ZC3H12A | Chr1: 37482800-37482819 |
| ZC3H12A | Chr1: 37475721-37475740 |
| ZC3H12A | Chr1: 37482715-37482734 |
| ZC3H12A | Chr1: 37480281-37480300 |
| ZC3H12A | Chr1: 37482491-37482510 |
| ZC3H12A | Chr1: 37483497-37483516 |
| ZC3H12A | Chr1: 37475899-37475918 |
| ZC3H12A | Chr1: 37475889-37475908 |
| ZC3H12A | Chr1: 37482375-37482394 |
| ZC3H12A | Chr1: 37475741-37475760 |
| ZC3H12A | Chr1: 37482900-37482919 |
| ZC3H12A | Chr1: 37482442-37482461 |
| ZC3H12A | Chr1: 37481644-37481663 |
| ZC3H12A | Chr1: 37482464-37482483 |
| ZC3H12A | Chr1: 37482994-37483013 |
| ZC3H12A | Chr1: 37483437-37483456 |
| ZC3H12A | Chr1: 37482736-37482755 |
| ZC3H12A | Chr1: 37482538-37482557 |
| ZC3H12A | Chr1: 37483515-37483534 |
| ZC3H12A | Chr1: 37475874-37475893 |
| ZC3H12A | Chr1: 37483145-37483164 |
| ZC3H12A | Chr1: 37482587-37482606 |
| ZC3H12A | Chr1: 37475482-37475501 |
| ZC3H12A | Chr1: 37475844-37475863 |
| ZC3H12A | Chr1: 37480415-37480434 |
| ZC3H12A | Chr1: 37481709-37481728 |
| ZC3H12A | Chr1: 37483366-37483385 |
| ZC3H12A | Chr1: 37475627-37475646 |
| ZC3H12A | Chr1: 37482447-37482466 |
| ZC3H12A | Chr1: 37481758-37481777 |
| ZC3H12A | Chr1: 37483560-37483579 |
| ZC3H12A | Chr1: 37475869-37475888 |
| ZC3H12A | Chr1: 37481655-37481674 |
| ZC3H12A | Chr1: 37481645-37481664 |
| ZC3H12A | Chr1: 37483016-37483035 |
| ZC3H12A | Chr1: 37475838-37475857 |
| ZC3H12A | Chr1: 37482850-37482869 |
| ZC3H12A | Chr1: 37475510-37475529 |
| ZC3H12A | Chr1: 37483510-37483529 |
| ZC3H12A | Chr1: 37483064-37483083 |
| ZC3H12A | Chr1: 37483149-37483168 |
| ZC3H12A | Chr1: 37483449-37483468 |
| ZC3H12A | Chr1: 37483264-37483283 |
| ZC3H12A | Chr1: 37475508-37475527 |
| ZC3H12A | Chr1: 37480415-37480434 |
| ZC3H12A | Chr1: 37482918-37482937 |
| ZC3H12A | Chr1: 37482474-37482493 |
| ZC3H12A | Chr1: 37483232-37483251 |
| ZC3H12A | Chr1: 37475732-37475751 |
| ZC3H12A | Chr1: 37481602-37481621 |
| ZC3H12A | Chr1: 37480289-37480308 |
| ZC3H12A | Chr1: 37483165-37483184 |
| ZC3H12A | Chr1: 37483248-37483267 |
| ZC3H12A | Chr1: 37483078-37483097 |
| ZC3H12A | Chr1: 37483017-37483036 |
| ZC3H12A | Chr1: 37483174-37483193 |
| ZC3H12A | Chr1: 37482857-37482876 |
| ZC3H12A | Chr1: 37475578-37475597 |
| ZC3H12A | Chr1: 37480329-37480348 |
| ZC3H12A | Chr1: 37480288-37480307 |
| ZC3H12A | Chr1: 37481600-37481619 |
| ZC3H12A | Chr1: 37483212-37483231 |
| ZC3H12A | Chr1: 37483337-37483356 |
| ZC3H12A | Chr1: 37475542-37475561 |
| ZC3H12A | Chr1: 37483197-37483216 |
| ZC3H12A | Chr1: 37482730-37482749 |
| ZC3H12A | Chr1: 37475599-37475618 |
| ZC3H12A | Chr1: 37483262-37483281 |
| ZC3H12A | Chr1: 37482790-37482809 |
| ZC3H12A | Chr1: 37482719-37482738 |
| ZC3H12A | Chr1: 37482860-37482879 |
| ZC3H12A | Chr1: 37483443-37483462 |
| ZC3H12A | Chr1: 37483558-37483577 |
| ZC3H12A | Chr1: 37481599-37481618 |
| ZC3H12A | Chr1: 37475845-37475864 |
| ZC3H12A | Chr1: 37475730-37475749 |
| ZC3H12A | Chr1: 37482524-37482543 |
| ZC3H12A | Chr1: 37482849-37482868 |
| ZC3H12A | Chr1: 37475529-37475548 |
| ZC3H12A | Chr1: 37475664-37475683 |
| ZC3H12A | Chr1: 37482972-37482991 |
| ZC3H12A | Chr1: 37483321-37483340 |
| ZC3H12A | Chr1: 37482984-37483003 |
| ZC3H12A | Chr1: 37475807-37475826 |
| ZC3H12A | Chr1: 37483213-37483232 |
| ZC3H12A | Chr1: 37482427-37482446 |
| ZC3H12A | Chr1: 37483104-37483123 |
| ZC3H12A | Chr1: 37482879-37482898 |
| ZC3H12A | Chr1: 37483409-37483428 |
| ZC3H12A | Chr1: 37482752-37482771 |
| ZC3H12A | Chr1: 37480391-37480410 |
| ZC3H12A | Chr1: 37475694-37475713 |
| ZC3H12A | Chr1: 37482458-37482477 |
| ZC3H12A | Chr1: 37475774-37475793 |
| ZC3H12A | Chr1: 37475574-37475593 |
| ZC3H12A | Chr1: 37475803-37475822 |
| ZC3H12A | Chr1: 37481605-37481624 |
| ZC3H12A | Chr1: 37482437-37482456 |
| ZC3H12A | Chr1: 37482825-37482844 |
| ZC3H12A | Chr1: 37483595-37483614 |
| ZC3H12A | Chr1: 37483510-37483529 |
| ZC3H12A | Chr1: 37483283-37483302 |
| ZC3H12A | Chr1: 37482446-37482465 |
| ZC3H12A | Chr1: 37475700-37475719 |
| ZC3H12A | Chr1: 37475721-37475740 |
| ZC3H12A | Chr1: 37475628-37475647 |
| ZC3H12A | Chr1: 37482848-37482867 |
| ZC3H12A | Chr1: 37483134-37483153 |
| ZC3H12A | Chr1: 37475543-37475562 |
| ZC3H12A | Chr1: 37482799-37482818 |
| ZC3H12A | Chr1: 37483296-37483315 |
| ZC3H12A | Chr1: 37483332-37483351 |
| ZC3H12A | Chr1: 37483600-37483619 |
| ZC3H12A | Chr1: 37482410-37482429 |
| ZC3H12A | Chr1: 37481718-37481737 |
| ZC3H12A | Chr1: 37483395-37483414 |
| ZC3H12A | Chr1: 37482428-37482447 |
| ZC3H12A | Chr1: 37475562-37475581 |
| ZC3H12A | Chr1: 37483500-37483519 |
| ZC3H12A | Chr1: 37475827-37475846 |
| ZC3H12A | Chr1: 37483586-37483605 |
| ZC3H12A | Chr1: 37483089-37483108 |
| ZC3H12A | Chr1: 37483419-37483438 |
| ZC3H12A | Chr1: 37480285-37480304 |
| ZC3H12A | Chr1: 37483256-37483275 |
| ZC3H12A | Chr1: 37483420-37483439 |
| ZC3H12A | Chr1: 37475691-37475710 |
| ZC3H12A | Chr1: 37483419-37483438 |
| ZC3H12A | Chr1: 37475918-37475937 |
| ZC3H12A | Chr1: 37475589-37475608 |
| ZC3H12A | Chr1: 37482362-37482381 |
| ZC3H12A | Chr1: 37482566-37482585 |
| ZC3H12A | Chr1: 37482963-37482982 |
| ZC3H12A | Chr1: 37483420-37483439 |
| ZC3H12A | Chr1: 37483139-37483158 |
| ZC3H12A | Chr1: 37483619-37483638 |
| ZC3H12A | Chr1: 37481764-37481783 |
| ZC3H12A | Chr1: 37475650-37475669 |
| ZC3H12A | Chr1: 37483405-37483424 |
| ZC3H12A | Chr1: 37483037-37483056 |
| ZC3H12A | Chr1: 37483211-37483230 |
| ZC3H12A | Chr1: 37475537-37475556 |
| ZC3H12A | Chr1: 37475756-37475775 |
| ZC3H12A | Chr1: 37482403-37482422 |
| ZC3H12A | Chr1: 37482455-37482474 |
| ZC3H12A | Chr1: 37480311-37480330 |
| ZC3H12A | Chr1: 37482586-37482605 |
| ZC3H12A | Chr1: 37483099-37483118 |
| ZC3H12A | Chr1: 37483342-37483361 |
| ZC3H12A | Chr1: 37481823-37481842 |
| ZC3H12A | Chr1: 37482777-37482796 |
| ZC3H12A | Chr1: 37482412-37482431 |
| ZC3H12A | Chr1: 37483604-37483623 |
| ZC3H12A | Chr1: 37483438-37483457 |
| ZC3H12A | Chr1: 37482445-37482464 |
| ZC3H12A | Chr1: 37483331-37483350 |
| ZC3H12A | Chr1: 37483111-37483130 |
| ZC3H12A | Chr1: 37482847-37482866 |
| ZC3H12A | Chr1: 37483249-37483268 |
| ZC3H12A | Chr1: 37481754-37481773 |
| ZC3H12A | Chr1: 37475684-37475703 |
| ZC3H12A | Chr1: 37482519-37482538 |
| ZC3H12A | Chr1: 37482475-37482494 |
| ZC3H12A | Chr1: 37482613-37482632 |
| ZC3H12A | Chr1: 37482939-37482958 |
| ZC3H12A | Chr1: 37475541-37475560 |
| ZC3H12A | Chr1: 37481763-37481782 |
| ZC3H12A | Chr1: 37483231-37483250 |
| ZC3H12A | Chr1: 37482953-37482972 |
| ZC3H12A | Chr1: 37482407-37482426 |
| ZC3H12A | Chr1: 37475808-37475827 |
| ZC3H12A | Chr1: 37481620-37481639 |
| ZC3H12A | Chr1: 37475592-37475611 |
| ZC3H12A | Chr1: 37483156-37483175 |
| ZC3H12A | Chr1: 37480329-37480348 |
| ZC3H12A | Chr1: 37475573-37475592 |
| ZC3H12A | Chr1: 37483198-37483217 |
| ZC3H12A | Chr1: 37483557-37483576 |
| ZC3H12A | Chr1: 37482892-37482911 |
| ZC3H12A | Chr1: 37483334-37483353 |
| ZC3H12A | Chr1: 37481708-37481727 |
| ZC3H12A | Chr1: 37483063-37483082 |
| ZC3H12A | Chr1: 37482998-37483017 |
| ZC3H12A | Chr1: 37482942-37482961 |
| ZC3H12A | Chr1: 37475508-37475527 |
| ZC3H12A | Chr1: 37482371-37482390 |
| ZC3H12A | Chr1: 37483119-37483138 |
| ZC3H12A | Chr1: 37482798-37482817 |
| ZC3H12A | Chr1: 37475859-37475878 |
| ZC3H12A | Chr1: 37483401-37483420 |
| ZC3H12A | Chr1: 37482851-37482870 |
| ZC3H12A | Chr1: 37475524-37475543 |
| ZC3H12A | Chr1: 37475601-37475620 |
| ZC3H12A | Chr1: 37475815-37475834 |
| ZC3H12A | Chr1: 37482801-37482820 |
| ZC3H12A | Chr1: 37475544-37475563 |
| ZC3H12A | Chr1: 37483010-37483029 |
| ZC3H12A | Chr1: 37483077-37483096 |
| ZC3H12A | Chr1: 37482404-37482423 |
| ZC3H12A | Chr1: 37475692-37475711 |
| ZC3H12A | Chr1: 37483596-37483615 |
| ZC3H12A | Chr1: 37483372-37483391 |
| ZC3H12A | Chr1: 37481596-37481615 |
| ZC3H12A | Chr1: 37480370-37480389 |
| ZC3H12A | Chr1: 37480377-37480396 |
| ZC3H12A | Chr1: 37483381-37483400 |
| ZC3H12A | Chr1: 37482899-37482918 |
| ZC3H12A | Chr1: 37480373-37480392 |
| ZC3H12A | Chr1: 37481847-37481866 |
| ZC3H12A | Chr1: 37483330-37483349 |
| ZC3H12A | Chr1: 37483065-37483084 |
| ZC3H12A | Chr1: 37482499-37482518 |
| ZC3H12A | Chr1: 37483105-37483124 |
| ZC3H12A | Chr1: 37475631-37475650 |
| ZC3H12A | Chr1: 37483530-37483549 |
| ZC3H12A | Chr1: 37483407-37483426 |
| ZC3H12A | Chr1: 37483308-37483327 |
| ZC3H12A | Chr1: 37482853-37482872 |
| ZC3H12A | Chr1: 37482934-37482953 |
| ZC3H12A | Chr1: 37475591-37475610 |
| ZC3H12A | Chr1: 37475826-37475845 |
| ZC3H12A | Chr1: 37475865-37475884 |
| ZC3H12A | Chr1: 37481784-37481803 |
| ZC3H12A | Chr1: 37480322-37480341 |
| ZC3H12A | Chr1: 37475664-37475683 |
| ZC3H12A | Chr1: 37475757-37475776 |
| ZC3H12A | Chr1: 37483385-37483404 |
| ZC3H12A | Chr1: 37482933-37482952 |
| ZC3H12A | Chr1: 37475866-37475885 |
| ZC3H12A | Chr1: 37475843-37475862 |
| ZC3H12A | Chr1: 37475797-37475816 |
| ZC3H12A | Chr1: 37475642-37475661 |
| ZC3H12A | Chr1: 37483270-37483289 |
| ZC3H12A | Chr1: 37483024-37483043 |
| ZC3H12A | Chr1: 37483201-37483220 |
| ZC3H12A | Chr1: 37482447-37482466 |
| ZC3H12A | Chr1: 37483253-37483272 |
| ZC3H12A | Chr1: 37483429-37483448 |
| ZC3H12A | Chr1: 37483195-37483214 |
| ZC3H12A | Chr1: 37481648-37481667 |
| ZC3H12A | Chr1: 37483424-37483443 |
| ZC3H12A | Chr1: 37475580-37475599 |
| ZC3H12A | Chr1: 37482980-37482999 |
| ZC3H12A | Chr1: 37480408-37480427 |
| ZC3H12A | Chr1: 37483405-37483424 |
| ZC3H12A | Chr1: 37475740-37475759 |
| ZC3H12A | Chr1: 37480387-37480406 |
| ZC3H12A | Chr1: 37483507-37483526 |
| ZC3H12A | Chr1: 37483110-37483129 |
| ZC3H12A | Chr1: 37483325-37483344 |
| ZC3H12A | Chr1: 37481692-37481711 |
| ZC3H12A | Chr1: 37475826-37475845 |
| ZC3H12A | Chr1: 37483098-37483117 |
| ZC3H12A | Chr1: 37481758-37481777 |
| ZC3H12A | Chr1: 37480320-37480339 |
| ZC3H12A | Chr1: 37483380-37483399 |
| ZC3H12A | Chr1: 37483011-37483030 |
| ZC3H12A | Chr1: 37483509-37483528 |
| ZC3H12A | Chr1: 37483509-37483528 |
| ZC3H12A | Chr1: 37482768-37482787 |
| ZC3H12A | Chr1: 37475804-37475823 |
| ZC3H12A | Chr1: 37475808-37475827 |
| ZC3H12A | Chr1: 37475859-37475878 |
| ZC3H12A | Chr1: 37482973-37482992 |
| ZC3H12A | Chr1: 37475634-37475653 |
| ZC3H12A | Chr1: 37475854-37475873 |
| ZC3H12A | Chr1: 37480334-37480353 |
| ZC3H12A | Chr1: 37480414-37480433 |
| ZC3H12A | Chr1: 37480316-37480335 |
| ZC3H12A | Chr1: 37482971-37482990 |
| ZC3H12A | Chr1: 37482781-37482800 |
| ZC3H12A | Chr1: 37483173-37483192 |
| ZC3H12A | Chr1: 37482391-37482410 |
| ZC3H12A | Chr1: 37482392-37482411 |
| ZC3H12A | Chr1: 37482936-37482955 |
| ZC3H12A | Chr1: 37483408-37483427 |
| ZC3H12A | Chr1: 37481779-37481798 |
| ZC3H12A | Chr1: 37483206-37483225 |
| ZC3H12A | Chr1: 37482561-37482580 |
| ZC3H12A | Chr1: 37481745-37481764 |
| ZC3H12A | Chr1: 37475802-37475821 |
| ZC3H12A | Chr1: 37483494-37483513 |
| ZC3H12A | Chr1: 37483371-37483390 |
| ZC3H12A | Chr1: 37482552-37482571 |
| ZC3H12A | Chr1: 37475491-37475510 |
| ZC3H12A | Chr1: 37482479-37482498 |
| ZC3H12A | Chr1: 37483140-37483159 |
| ZC3H12A | Chr1: 37483313-37483332 |
| ZC3H12A | Chr1: 37483458-37483477 |
| ZC3H12A | Chr1: 37483320-37483339 |
| ZC3H12A | Chr1: 37483204-37483223 |
| ZC3H12A | Chr1: 37475792-37475811 |
| ZC3H12A | Chr1: 37483475-37483494 |
| ZC3H12A | Chr1: 37475577-37475596 |
| ZC3H12A | Chr1: 37475787-37475806 |
| ZC3H12A | Chr1: 37483574-37483593 |
| ZC3H12A | Chr1: 37480284-37480303 |
| ZC3H12A | Chr1: 37482369-37482388 |
| ZC3H12A | Chr1: 37483384-37483403 |
| ZC3H12A | Chr1: 37483425-37483444 |
| ZC3H12A | Chr1: 37482582-37482601 |
| ZC3H12A | Chr1: 37483153-37483172 |
| ZC3H12A | Chr1: 37482935-37482954 |
| ZC3H12A | Chr1: 37483378-37483397 |
| ZC3H12A | Chr1: 37482952-37482971 |
| ZC3H12A | Chr1: 37483399-37483418 |
| ZC3H12A | Chr1: 37483309-37483328 |
| ZC3H12A | Chr1: 37483200-37483219 |
| ZC3H12A | Chr1: 37481641-37481660 |
| ZC3H12A | Chr1: 37481656-37481675 |
| ZC3H12A | Chr1: 37483036-37483055 |
| ZC3H12A | Chr1: 37483474-37483493 |
| ZC3H12A | Chr1: 37483004-37483023 |
| ZC3H12A | Chr1: 37481846-37481865 |
| ZC3H12A | Chr1: 37483205-37483224 |
| ZC3H12A | Chr1: 37483406-37483425 |
| ZC3H12A | Chr1: 37480336-37480355 |
| ZC3H12A | Chr1: 37481716-37481735 |
| ZC3H12A | Chr1: 37480335-37480354 |
| ZC3H12A | Chr1: 37481659-37481678 |
| ZC3H12A | Chr1: 37475809-37475828 |
| ZC3H12A | Chr1: 37482565-37482584 |
| ZC3H12A | Chr1: 37482491-37482510 |
| ZC3H12A | Chr1: 37483379-37483398 |
| ZC3H12A | Chr1: 37481654-37481673 |
| ZC3H12A | Chr1: 37482567-37482586 |
| ZC3H12A | Chr1: 37481614-37481633 |
| ZC3H12A | Chr1: 37482562-37482581 |
| ZC3H12A | Chr1: 37475868-37475887 |
| ZC3H12A | Chr1: 37482557-37482576 |
| ZC3H12A | Chr1: 37483511-37483530 |
| ZC3H12A | Chr1: 37475615-37475634 |
| ZC3H12A | Chr1: 37483333-37483352 |
| ZC3H12A | Chr1: 37482840-37482859 |
| ZC3H12A | Chr1: 37483545-37483564 |
| ZC3H12A | Chr1: 37482830-37482849 |
| ZC3H12A | Chr1: 37482444-37482463 |
| ZC3H12A | Chr1: 37482571-37482590 |
| ZC3H12A | Chr1: 37482553-37482572 |
| ZC3H12A | Chr1: 37483543-37483562 |
| ZC3H12A | Chr1: 37483542-37483561 |
| ZC3H12A | Chr1: 37482575-37482594 |
| ZC3H12A | Chr1: 37475855-37475874 |
| ZC3H12A | Chr1: 37482572-37482591 |

TABLE 8
Zc3h12a Murine Genome Coordinates

| Target | Coordinates |
|---|---|
| Zc3h12a | Chr1: 125122335-125122354 |
| Zc3h12a | Chr1: 125121083-125121102 |
| Zc3h12a | Chr1: 125120961-125120980 |
| Zc3h12a | Chr1: 125122390-125122409 |
| Zc3h12a | Chr1: 125120373-125120392 |
| Zc3h12a | Chr1: 125122250-125122269 |
| Zc3h12a | Chr1: 125122375-125122394 |
| Zc3h12a | Chr1: 125120975-125120994 |

[0205] In some embodiments, the at least one SOCS1-, PTPN2-, or ZC3H12A-targeting siRNA molecule or shRNA molecule is obtained from a commercial suppliers such as Sigma Aldrich®, Dharmacon®, ThermoFisher®, and the like. In some embodiments, the at least one SOCS1-, PTPN2-, or ZC3H12A-targeting siRNA molecule is one shown in Table 9. In some embodiments, the at least one SOCS1-, PTPN2-, or ZC3H12A-targeting shRNA molecule is one shown in Table 10.

TABLE 9
Exemplary SOCS1, PTPN2, and ZC3H12A siRNAs

| Target Gene | siRNA construct |
|---|---|
| SOCS1 | MISSION ® esiRNA targeting mouse Socs1 |
| | (SigmaAlrich# EMU203261) |
| | Rosetta Predictions human (SigmaAlrich# |
| | NM_003745) |
| | Rosetta Predictions murine (SigmaAlrich# |
| | NM_009896) |
| PTPN2 | MISSION ® esiRNA human PTPN2 (esiRNA1) |
| | (SigmaAldrich# EHU113971) |
| | human Rosetta Predictions (SigmaAldrich# |
| | NM_002828) |
| | human Rosetta Predictions (SigmaAldrich# |
| | NM_080422) |
| | human Rosetta Predictions (SigmaAldrich# |
| | NM_080423) |
| | murine Rosetta Predictions (SigmaAldrich# |
| | NM_001127177) |
| ZC3H12A | MISSION ® esiRNA targeting human ZC3H12A |
| | (esiRNA1) (SigmaAldrich# EHU009491) |
| | MISSION ® esiRNA targeting mouse Zc3h12a |
| | (esiRNA1) (SigmaAldrich# EMU048551) |
| | Rosetta Predictions human (SigmaAldrich# |
| | NM_025079) |
| | Rosetta Predictions mouse (SigmaAldrich# |
| | NM_153159) |

TABLE 10
Exemplary SOCS1, PTPN2, and ZC3H12A shRNAs

| Target Gene | shRNA construct |
|---|---|
| SOCS1 | MISSION ® shRNA Plasmid DNA human |
| | (SigmaAlrich# SHCLND-NM_003745) |
| | MISSION ® shRNA Plasmid DNA murine |
| | (SigmaAlrich# SHCLND-NM_009896) |
| PTPN2 | MISSION ® shRNA Plasmid human |
| | (SigmaAldrich# SHCLND-NM_002827) |
| | MISSION ® shRNA Plasmid murine |
| | (SigmaAldrich# SHCLND-NM_011201) |
| ZC3H12A | MISSION ® shRNA Plasmid DNA human |
| | (SigmaAldrich# SHCLND-NM_025079) |
| | MISSION ® shRNA Plasmid DNA mouse |
| | (SigmaAldrich# SHCLND-NM_153159) |

[0206] In some embodiments, the nucleic acid-based gene-regulating system comprises at least two nucleic acid molecules (e.g., an siRNA, an shRNA, an RNA aptamer, or a morpholino), wherein at least one nucleic acid molecule is a SOCS1-targeting nucleic acid molecule and at least one nucleic acid molecule is a PTPN2-targeting nucleic acid molecule. In some embodiments, the at least one SOCS1-targeting nucleic acid molecule binds to a target RNA sequence that is at least 95%, 96%, 97%, 98%, or 99% identical to an RNA sequence encoded by the SOCS1 gene (SEQ ID NO: 1) or the Socs1 gene (SEQ ID NO: 2) and the at least one PTPN2-targeting nucleic acid molecule binds to a target RNA sequence that is at least 95%, 96%, 97%, 98%, or 99% identical to an RNA sequence encoded by the PTPN2 gene (SEQ ID NO: 3) or the Ptpn2 gene (SEQ ID NO: 4). In some embodiments, the at least one SOCS1-targeting nucleic acid molecule binds to a target RNA sequence that is 100% identical to an RNA sequence encoded by the SOCS1 gene (SEQ ID NO: 1) or the Socs1 gene (SEQ ID NO: 2) and the at least one PTPN2-targeting nucleic acid molecule binds to a target RNA sequence that is 100% identical to an RNA sequence encoded by the PTPN2 gene (SEQ ID NO: 3) or the Ptpn2 gene (SEQ ID NO: 4).

[0207] In some embodiments, the at least one SOCS1-targeting nucleic acid molecule binds to a target RNA sequence that is at least 95%, 96%, 97%, 98%, or 99% identical to a RNA sequence encoded by a DNA sequence defined by a set of genomic coordinates shown in Table 3 or Table 4 and the at least one PTPN2-targeting nucleic acid molecule binds to a target RNA sequence that is at least 95%, 96%, 97%, 98%, or 99% identical to a RNA sequence encoded by a DNA sequence defined by a set of genomic coordinates shown in Table 5 or Table 6. In some embodiments, the at least one SOCS1-targeting nucleic acid molecule binds to a target RNA sequence that is 100% identical to a RNA sequence encoded by a DNA sequence defined by a set of genomic coordinates shown in Table 3 or Table 4 and the at least one PTPN2-targeting nucleic acid molecule binds to a target RNA sequence that is 100% identical to a RNA sequence encoded by a DNA sequence defined by a set of genomic coordinates shown in Table 5 or Table 6.

[0208] In some embodiments, the at least one SOCS1-targeting nucleic acid molecule binds to a target RNA sequence that is at least 95%, 96%, 97%, 98%, or 99% identical to an RNA sequence encoded by one of SEQ ID NOs: 7-151 and the at least one PTPN2-targeting nucleic acid molecule binds to a target RNA sequence that is at least 95%, 96%, 97%, 98%, or 99% identical to an RNA sequence encoded by one of SEQ ID NOs: 185-207. In some embodiments, the at least one SOCS1-targeting nucleic acid molecule binds to a target RNA sequence that is 100% identical to an RNA sequence encoded by one of SEQ ID NOs: 7-151 and the at least one PTPN2-targeting nucleic acid molecule binds to a target RNA sequence that is 100% identical to an RNA sequence encoded by one of SEQ ID NOs: 185-207.

[0209] In some embodiments, the nucleic acid-based gene-regulating system comprises at least two siRNA or shRNA molecules, wherein at least one siRNA or shRNA molecule is a SOCS1-targeting siRNA or shRNA molecule and at least one siRNA or shRNA molecule is a PTPN2-targeting siRNA or shRNA molecule. In some embodiments, the least one SOCS1-targeting nucleic acid molecule is an siRNA or an shRNA molecule and at least one PTPN2-targeting nucleic acid molecule is an siRNA or shRNA molecule. In some embodiments, the at least one SOCS1-targeting siRNA or an shRNA molecule binds to a target RNA sequence that is at least 95%, 96%, 97%, 98%, or 99% identical to an RNA sequence encoded by the SOCS1 gene (SEQ ID NO: 1) or the Socs1 gene (SEQ ID NO: 2) and the at least one PTPN2-targeting siRNA or shRNA molecule binds to a target RNA sequence that is at least 95%, 96%, 97%, 98%, or 99% identical to an RNA sequence encoded by the PTPN2 gene (SEQ ID NO: 3) or the Ptpn2 gene (SEQ ID NO: 4). In some embodiments, the at least one SOCS1-targeting siRNA or an shRNA molecule binds to a target RNA sequence that is 100% identical to an RNA sequence encoded by the SOCS1 gene (SEQ ID NO: 1) or the Socs1 gene (SEQ ID NO: 2) and the at least one PTPN2-targeting siRNA or shRNA molecule binds to a target RNA sequence that is 100% identical to an RNA sequence encoded by the PTPN2 gene (SEQ ID NO: 3) or the Ptpn2 gene (SEQ ID NO: 4).

[0210] In some embodiments, the at least one SOCS1-targeting siRNA or shRNA molecule binds to a target RNA sequence that is at least 95%, 96%, 97%, 98%, or 99% identical to a RNA sequence encoded by a DNA sequence defined by a set of genomic coordinates shown in Table 3 or Table 4 and the at least one PTPN2-targeting siRNA or shRNA molecule binds to a target RNA sequence that is at least 95%, 96%, 97%, 98%, or 99% identical to a RNA sequence encoded by a DNA sequence defined by a set of genomic coordinates shown in Table 5 or Table 6. In some embodiments, the at least one SOCS1-targeting siRNA or shRNA molecule binds to a target RNA sequence that is 100% identical to a RNA sequence encoded by a DNA sequence defined by a set of genomic coordinates shown in Table 3 or Table 4 and the at least one PTPN2-targeting siRNA or shRNA molecule binds to a target RNA sequence that is 100% identical to a RNA sequence encoded by a DNA sequence defined by a set of genomic coordinates shown in Table 5 or Table 6.

[0211] In some embodiments, the at least one SOCS1-targeting siRNA or shRNA molecule binds to a target RNA sequence that is at least 95%, 96%, 97%, 98%, or 99% identical to an RNA sequence encoded by one of SEQ ID NOs: 7-151 and the at least one PTPN2-targeting siRNA or shRNA molecule binds to a target RNA sequence that is at least 95%, 96%, 97%, 98%, or 99% identical to an RNA sequence encoded by one of SEQ ID NOs: 185-207. In some embodiments, the at least one SOCS1-targeting siRNA or shRNA molecule binds to a target RNA sequence that is 100% identical to an RNA sequence encoded by one of SEQ ID NOs: 7-151 and the at least one PTPN2-targeting siRNA or shRNA molecule binds to a target RNA sequence that is 100% identical to an RNA sequence encoded by one of SEQ ID NOs: 185-207.

[0212] In some embodiments, the nucleic acid-based gene-regulating system comprises at least two nucleic acid molecules (e.g., an siRNA, an shRNA, an RNA aptamer, or a morpholino), wherein at least one nucleic acid molecule is a SOCS1-targeting nucleic acid molecule and at least one nucleic acid molecule is a ZC3H12A-targeting nucleic acid molecule. In some embodiments, the at least one SOCS1-targeting nucleic acid molecule binds to a target RNA sequence that is at least 95%, 96%, 97%, 98%, or 99% identical to an RNA sequence encoded by the SOCS1 gene (SEQ ID NO: 1) or the Socs1 gene (SEQ ID NO: 2) and the at least one ZC3H12A-targeting nucleic acid molecule binds to a target RNA sequence that is at least 95%, 96%, 97%, 98%, or 99% identical to an RNA sequence encoded by the ZC3H12A gene (SEQ ID NO: 5) or the Zc3h12a gene (SEQ ID NO: 6). In some embodiments, the at least one SOCS1-targeting nucleic acid molecule binds to a target RNA sequence that is 100% identical to an RNA sequence encoded by the SOCS1 gene (SEQ ID NO: 1) or the Socs1 gene (SEQ ID NO: 2) and the at least one ZC3H12A-targeting nucleic acid molecule binds to a target RNA sequence that is 100% identical to an RNA sequence encoded by the ZC3H12A gene (SEQ ID NO: 5) or the Zc3h12a gene (SEQ ID NO: 6).

[0213] In some embodiments, the at least one SOCS1-targeting nucleic acid molecule binds to a target RNA sequence that is at least 95%, 96%, 97%, 98%, or 99% identical to a RNA sequence encoded by a DNA sequence defined by a set of genomic coordinates shown in Table 3 or Table 4 and the at least one ZC3H/2A-targeting nucleic acid molecule binds to a target RNA sequence that is at least 95%, 96%, 97%, 98%, or 99% identical to a RNA sequence encoded by a DNA sequence defined by a set of genomic coordinates shown in Table 7 or Table 8. In some embodiments, the at least one SOCS1-targeting nucleic acid molecule binds to a target RNA sequence that is 100% identical to a RNA sequence encoded by a DNA sequence defined by a set of genomic coordinates shown in Table 3 or Table 4 and the at least one ZC3H/2A-targeting nucleic acid molecule binds to a target RNA sequence that is 100% identical to a RNA sequence encoded by a DNA sequence defined by a set of genomic coordinates shown in Table 7 or Table 8.

[0214] In some embodiments, the at least one SOCS1-targeting nucleic acid molecule binds to a target RNA sequence that is at least 95%, 96%, 97%, 98%, or 99% identical to an RNA sequence encoded by one of SEQ ID NOs: 7-151 and the at least one ZC3H12A-targeting nucleic acid molecule binds to a target RNA sequence that is at least 95%, 96%, 97%, 98%, or 99% identical to an RNA sequence encoded by one of SEQ ID NOs: 208-230. In some embodiments, the at least one SOCS1-targeting nucleic acid molecule binds to a target RNA sequence that is 100% identical to an RNA sequence encoded by one of SEQ ID NOs: 7-151 and the at least one ZC3H/2A-targeting nucleic acid molecule binds to a target RNA sequence that is 100% identical to an RNA sequence encoded by one of SEQ ID NOs: 208-230.

[0215] In some embodiments, the nucleic acid-based gene-regulating system comprises at least two siRNA or shRNA molecules, wherein at least one siRNA or shRNA molecule is a SOCS1-targeting siRNA or shRNA molecule and at least one siRNA or shRNA molecule is a ZC3H12A-targeting siRNA or shRNA molecule. In some embodiments, the least one SOCS1-targeting nucleic acid molecule is an siRNA or an shRNA molecule and at least one ZC3H/2A-targeting nucleic acid molecule is an siRNA or shRNA molecule. In some embodiments, the at least one SOCS1-targeting siRNA or an shRNA molecule binds to a target RNA sequence that is at least 95%, 96%, 97%, 98%, or 99% identical to an RNA sequence encoded by the SOCS1 gene (SEQ ID NO: 1) or the Socs1 gene (SEQ ID NO: 2) and the at least one ZC3H/2A-targeting siRNA or shRNA molecule binds to a target RNA sequence that is at least 95%, 96%, 97%, 98%, or 99% identical to an RNA sequence encoded by the ZC3H12A gene (SEQ ID NO: 5) or the Zc3h12a gene (SEQ ID NO: 6). In some embodiments, the at least one SOCS1-targeting siRNA or an shRNA molecule binds to a target RNA sequence that is 100% identical to an RNA sequence encoded by the SOCS1 gene (SEQ ID NO: 1) or the Socs1 gene (SEQ ID NO: 2) and the at least one ZC3H/2A-targeting siRNA or shRNA molecule binds to a target RNA sequence that is 100% identical to an RNA sequence encoded by the ZC3H12A gene (SEQ ID NO: 5) or the Zc3h12a gene (SEQ ID NO: 6).

[0216] In some embodiments, the at least one SOCS1-targeting siRNA or shRNA molecule binds to a target RNA sequence that is at least 95%, 96%, 97%, 98%, or 99% identical to a RNA sequence encoded by a DNA sequence defined by a set of genomic coordinates shown in Table 3 or Table 4 and the at least one ZC3H/2A-targeting siRNA or shRNA molecule binds to a target RNA sequence that is at least 95%, 96%, 97%, 98%, or 99% identical to a RNA sequence encoded by a DNA sequence defined by a set of genomic coordinates shown in Table 7 or Table 8. In some embodiments, the at least one SOCS1-targeting siRNA or shRNA molecule binds to a target RNA sequence that is 100% identical to a RNA sequence encoded by a DNA sequence defined by a set of genomic coordinates shown in Table 3 or Table 4 and the at least one ZC3H/2A-targeting siRNA or shRNA molecule binds to a target RNA sequence that is 100% identical to a RNA sequence encoded by a DNA sequence defined by a set of genomic coordinates shown in Table 7 or Table 8.

[0217] In some embodiments, the at least one SOCS1-targeting siRNA or shRNA molecule binds to a target RNA sequence that is at least 95%, 96%, 97%, 98%, or 99% identical to an RNA sequence encoded by one of SEQ ID NOs: 7-151 and the at least one ZC3H/2A-targeting siRNA or shRNA molecule binds to a target RNA sequence that is at least 95%, 96%, 97%, 98%, or 99% identical to an RNA sequence encoded by one of SEQ ID NOs: 208-230. In some embodiments, the at least one SOCS1-targeting siRNA or shRNA molecule binds to a target RNA sequence that is 100% identical to an RNA sequence encoded by one of SEQ ID NOs: 7-151 and the at least one ZC3H12A-targeting siRNA or shRNA molecule binds to a target RNA sequence that is 100% identical to an RNA sequence encoded by one of SEQ ID NOs: 208-230.

[0218] In some embodiments, the nucleic acid-based gene-regulating system comprises at least two nucleic acid molecules (e.g., an siRNA, an shRNA, an RNA aptamer, or a morpholino), wherein at least one nucleic acid molecule is a PTPN2-targeting nucleic acid molecule and at least one nucleic acid molecule is a ZC3H/2A-targeting nucleic acid molecule. In some embodiments, the at least one PTPN2-targeting nucleic acid molecule binds to a target RNA sequence that is at least 95%, 96%, 97%, 98%, or 99% identical to an RNA sequence encoded by the PTPN2 gene (SEQ ID NO: 3) or the Ptpn2 gene (SEQ ID NO: 4) and the at least one ZC3H/2A-targeting nucleic acid molecule binds to a target RNA sequence that is at least 95%, 96%, 97%, 98%, or 99% identical to an RNA sequence encoded by the ZC3H12A gene (SEQ ID NO: 5) or the Zc3h12a gene (SEQ ID NO: 6). In some embodiments, the at least one PTPN2-targeting nucleic acid molecule binds to a target RNA sequence that is 100% identical to an RNA sequence encoded by the PTPN2 gene (SEQ ID NO: 3) or the Ptpn2 gene (SEQ ID NO: 4) and the at least one ZC3H12A-targeting nucleic acid molecule binds to a target RNA sequence that is 100% identical to an RNA sequence encoded by the ZC3H12A gene (SEQ ID NO: 5) or the Zc3h12a gene (SEQ ID NO: 6).

[0219] In some embodiments, the at least one PTPN2-targeting nucleic acid molecule binds to a target RNA sequence that is at least 95%, 96%, 97%, 98%, or 99% identical to a RNA sequence encoded by a DNA sequence defined by a set of genomic coordinates shown in Table 5 or Table 6 and the at least one ZC3H12A-targeting nucleic acid molecule binds to a target RNA sequence that is at least 95%, 96%, 97%, 98%, or 99% identical to a RNA sequence encoded by a DNA sequence defined by a set of genomic coordinates shown in Table 7 or Table 8. In some embodiments, the at least one PTPN2-targeting nucleic acid molecule binds to a target RNA sequence that is 100% identical to a RNA sequence encoded by a DNA sequence defined by a set of genomic coordinates shown in Table 5 or Table 6 and the at least one ZC3H12A-targeting nucleic acid molecule binds to a target RNA sequence that is 100% identical to a RNA sequence encoded by a DNA sequence defined by a set of genomic coordinates shown in Table 7 or Table 8.

[0220] In some embodiments, the at least one PTPN2-targeting nucleic acid molecule binds to a target RNA sequence that is at least 95%, 96%, 97%, 98%, or 99% identical to an RNA sequence encoded by one of SEQ ID NOs: 185-207 and the at least one ZC3H12A-targeting nucleic acid molecule binds to a target RNA sequence that is at least 95%, 96%, 97%, 98%, or 99% identical to an RNA sequence encoded by one of SEQ ID NOs: 208-230. In some embodiments, the at least one PTPN2-targeting nucleic acid molecule binds to a target RNA sequence that is 100% identical to an RNA sequence encoded by one of SEQ ID NOs: 185-207 and the at least one ZC3H12A-targeting nucleic acid molecule binds to a target RNA sequence that is 100% identical to an RNA sequence encoded by one of SEQ ID NOs: 208-230.

[0221] In some embodiments, the nucleic acid-based gene-regulating system comprises at least two siRNA or shRNA molecules, wherein at least one siRNA or shRNA molecule is a PTPN2-targeting siRNA or shRNA molecule and at least one siRNA or shRNA molecule is a ZC3H12A-targeting siRNA or shRNA molecule. In some embodiments, the at least one PTPN2-targeting siRNA or an shRNA molecule binds to a target RNA sequence that is at least 95%, 96%, 97%, 98%, or 99% identical to an RNA sequence encoded by the PTPN2 gene (SEQ ID NO: 3) or the Ptpn2 gene (SEQ ID NO: 4) and the at least one ZC3H12A-targeting siRNA or shRNA molecule binds to a target RNA sequence that is at least 95%, 96%, 97%, 98%, or 99% identical to an RNA sequence encoded by the ZC3H12A gene (SEQ ID NO: 5) or the Zc3h12a gene (SEQ ID NO: 6). In some embodiments, the at least one PTPN2-targeting siRNA or an shRNA molecule binds to a target RNA sequence that is 100% identical to an RNA sequence encoded by the PTPN2 gene (SEQ ID NO: 3) or the Ptpn2 gene (SEQ ID NO: 4) and the at least one ZC3H12A-targeting siRNA or shRNA molecule binds to a target RNA sequence that is 100% identical to an RNA sequence encoded by the ZC3H12A gene (SEQ ID NO: 5) or the Zc3h12a gene (SEQ ID NO: 6).

[0222] In some embodiments, the at least one PTPN2-targeting siRNA or shRNA molecule binds to a target RNA sequence that is at least 95%, 96%, 97%, 98%, or 99% identical to a RNA sequence encoded by a DNA sequence defined by a set of genomic coordinates shown in Table 5 or Table 6 and the at least one ZC3H12A-targeting siRNA or shRNA molecule binds to a target RNA sequence that is at least 95%, 96%, 97%, 98%, or 99% identical to a RNA sequence encoded by a DNA sequence defined by a set of genomic coordinates shown in Table 7 or Table 8. In some embodiments, the at least one PTPN2-targeting siRNA or shRNA molecule binds to a target RNA sequence that is 100% identical to a RNA sequence encoded by a DNA sequence defined by a set of genomic coordinates shown in Table 5 or Table 6 and the at least one ZC3H12A-targeting siRNA or shRNA molecule binds to a target RNA sequence that is 100% identical to a RNA sequence encoded by a DNA sequence defined by a set of genomic coordinates shown in Table 7 or Table 8.

[0223] In some embodiments, the at least one PTPN2-targeting siRNA or shRNA molecule binds to a target RNA sequence that is at least 95%, 96%, 97%, 98%, or 99% identical to an RNA sequence encoded by one of SEQ ID NOs: 185-207 and the at least one ZC3H12A-targeting siRNA or shRNA molecule binds to a target RNA sequence that is at least 95%, 96%, 97%, 98%, or 99% identical to an RNA sequence encoded by one of SEQ ID NOs: 208-230. In some embodiments, the at least one PTPN2-targeting siRNA or shRNA molecule binds to a target RNA sequence that is 100% identical to an RNA sequence encoded by one of SEQ ID NOs: 185-207 and the at least one ZC3H12A-targeting siRNA or shRNA molecule binds to a target RNA sequence that is 100% identical to an RNA sequence encoded by one of SEQ ID NOs: 208-230.

### B. Protein-Based Gene-Regulating Systems

[0224] In some embodiments, the present disclosure provides protein gene-regulating systems comprising two or more proteins capable of reducing the expression and/or function of at least two endogenous genes selected from SOCS1, PTPN2, and ZC3H12A. In some embodiments, the present disclosure provides modified immune effector cells comprising such gene-regulating systems. In some embodiments, a protein-based gene-regulating system is a system comprising one or more proteins capable of regulating the expression of an endogenous target gene in a sequence specific manner without the requirement for a nucleic acid guide molecule. In some embodiments, the protein-based gene-regulating system comprises a protein comprising one or more zinc-finger binding domains and an enzymatic domain. In some embodiments, the protein-based gene-regulating system comprises a protein comprising a Transcription activator-like effector nuclease (TALEN) domain and an enzymatic domain. Such embodiments are referred to herein as “TALENs”.

### 1. Zinc Finger Systems

[0225] In some embodiments, the present disclosure provides zinc finger gene-regulating systems comprising two or more zinc finger fusion proteins capable of reducing the expression and/or function of at least two endogenous genes selected from SOCS1, PTPN2, and ZC3H12A. In some embodiments, the present disclosure provides modified immune effector cells comprising such gene-regulating systems. Herein, zinc finger-based systems comprise a fusion protein with two protein domains: a zinc finger DNA binding domain and an enzymatic domain. A “zinc finger DNA binding domain”, “zinc finger protein”, or “ZFP” is a protein, or a domain within a larger protein, that binds DNA in a sequence-specific manner through one or more zinc fingers, which are regions of amino acid sequence within the binding domain whose structure is stabilized through coordination of a zinc ion. The zinc finger domain, by binding to a target DNA sequence, directs the activity of the enzymatic domain to the vicinity of the sequence and, hence, induces modification of the endogenous target gene in the vicinity of the target sequence. A zinc finger domain can be engineered to bind to virtually any desired sequence. Accordingly, after identifying a target genetic locus containing a target DNA sequence at which cleavage or recombination is desired (e.g., a target locus in a target gene referenced in Tables 2 or 3), one or more zinc finger binding domains can be engineered to bind to one or more target DNA sequences in the target genetic locus. Expression of a fusion protein comprising a zinc finger binding domain and an enzymatic domain in a cell affects modification in the target genetic locus.

[0226] In some embodiments, a zinc finger binding domain comprises one or more zinc fingers. Miller et al. (1985) EMBO J. 4:1609-1614; Rhodes (1993) Scientific American Febuary:56-65; U.S. Pat. No. 6,453,242. Typically, a single zinc finger domain is about 30 amino acids in length. An individual zinc finger binds to a three-nucleotide (i.e., triplet) sequence (or a four-nucleotide sequence which can overlap, by one nucleotide, with the four-nucleotide binding site of an adjacent zinc finger). Therefore, the length of a sequence to which a zinc finger binding domain is engineered to bind (e.g., a target sequence) will determine the number of zinc fingers in an engineered zinc finger binding domain. For example, for ZFPs in which the finger motifs do not bind to overlapping subsites, a six-nucleotide target sequence is bound by a two-finger binding domain; a nine-nucleotide target sequence is bound by a three-finger binding domain, etc. Binding sites for individual zinc fingers (i.e., subsites) in a target site need not be contiguous, but can be separated by one or several nucleotides, depending on the length and nature of the amino acids sequences between the zinc fingers (i.e., the inter-finger linkers) in a multi-finger binding domain. In some embodiments, the DNA-binding domains of individual ZFNs comprise between three and six individual zinc finger repeats and can each recognize between 9 and 18 basepairs.

[0227] Zinc finger binding domains can be engineered to bind to a sequence of choice. See, for example, Beerli et al. (2002) Nature Biotechnol. 20:135-141; Pabo et al. (2001) Ann. Rev. Biochem. 70:313-340; Isalan et al. (2001) Nature Biotechnol. 19:656-660; Segal et al. (2001) Curr. Opin. Biotechnol. 12:632-637; Choo et al. (2000) Curr. Opin. Struct. Biol. 10:411-416. An engineered zinc finger binding domain can have a novel binding specificity, compared to a naturally-occurring zinc finger protein. Engineering methods include, but are not limited to, rational design and various types of selection.

[0228] Selection of a target DNA sequence for binding by a zinc finger domain can be accomplished, for example, according to the methods disclosed in U.S. Pat. No. 6,453,242. It will be clear to those skilled in the art that simple visual inspection of a nucleotide sequence can also be used for selection of a target DNA sequence. Accordingly, any means for target DNA sequence selection can be used in the methods described herein. A target site generally has a length of at least 9 nucleotides and, accordingly, is bound by a zinc finger binding domain comprising at least three zinc fingers. However binding of, for example, a 4-finger binding domain to a 12-nucleotide target site, a 5-finger binding domain to a 15-nucleotide target site or a 6-finger binding domain to an 18-nucleotide target site, is also possible. As will be apparent, binding of larger binding domains (e.g., 7-, 8-, 9-finger and more) to longer target sites is also possible.

[0229] In some embodiments, the protein-based gene-regulating system comprises at least two zinc finger fusion proteins (ZFP), wherein at least one ZFP comprises a SOCS1-targeting zinc finger binding domain. In some embodiments, the at least one SOCS1-targeting zinc finger binding domain binds to a target DNA sequence that is at least 95%, 96%, 97%, 98%, or 99% identical to a target DNA sequence in the SOCS1 gene (SEQ ID NO: 1) or the Socs1 gene (SEQ ID NO: 2). In some embodiments, the at least one SOCS1-targeting zinc finger binding domain binds to a target DNA sequence that is 100% identical to a target DNA sequence in the SOCS1 gene (SEQ ID NO: 1) or the Socs1 gene (SEQ ID NO: 2).

[0230] In some embodiments, the at least one SOCS1-targeting zinc finger binding domain binds to a target DNA sequence that is at least 95%, 96%, 97%, 98%, or 99% identical to a DNA sequence defined by a set of genomic coordinates shown in Table 3 or Table 4. In some embodiments, the at least one SOCS1-targeting zinc finger binding domain binds to a target DNA sequence that is 100% identical to a DNA sequence defined by a set of genomic coordinates shown in Table 3 or Table 4. In some embodiments, the at least one SOCS1-targeting zinc finger binding domain binds to a target DNA sequence that is at least 90%, 95%, 96%, 97%, 98%, or 99% identical to one of SEQ ID NOs: 7-151. In some embodiments, the at least one SOCS1-targeting zinc finger binding domain binds to a target DNA sequence that is 100% identical to one of SEQ ID NOs: 7-151. Exemplary SOCS1 target DNA sequences are shown in Tables 12 and 13.

[0231] In some embodiments, the protein-based gene-regulating system comprises at least two zinc finger fusion proteins (ZFP), wherein at least one ZFP comprises a PTPN2-targeting zinc finger binding domain. In some embodiments, the at least one PTPN2-targeting zinc finger binding domain binds to a target DNA sequence that is at least 95%, 96%, 97%, 98%, or 99% identical to a target DNA sequence in the PTPN2 gene (SEQ ID NO: 3) or the Ptpn2 gene (SEQ ID NO: 4). In some embodiments, the at least one PTPN2-targeting zinc finger binding domain binds to a target DNA sequence that is 100% identical to a target DNA sequence in the PTPN2 gene (SEQ ID NO: 3) or the Ptpn2 gene (SEQ ID NO: 4).

[0232] In some embodiments, the at least one PTPN2-targeting zinc finger binding domain binds to a target DNA sequence that is at least 95%, 96%, 97%, 98%, or 99% identical to a DNA sequence defined by a set of genomic coordinates shown in Table 5 or Table 6. In some embodiments, the at least one PTPN2-targeting zinc finger binding domain binds to a target DNA sequence that is 100% identical to a DNA sequence defined by a set of genomic coordinates shown in Table 5 or Table 6. In some embodiments, the at least one PTPN2-targeting zinc finger binding domain binds to a target DNA sequence that is at least 95%, 96%, 97%, 98%, or 99% identical to one of SEQ ID NOs: 185-207. In some embodiments, the at least one PTPN2-targeting zinc finger binding domain binds to a target DNA sequence that is 100% identical to one of SEQ ID NOs: 185-207. Exemplary PTPN2 target DNA sequences are shown in Tables 14 and 15.

[0233] In some embodiments, the protein-based gene-regulating system comprises at least two zinc finger fusion proteins (ZFP), wherein at least one ZFP comprises a ZC3H12A-targeting zinc finger binding domain. In some embodiments, the at least one ZC3H12A-targeting zinc finger binding domain binds to a target DNA sequence that is at least 95%, 96%, 97%, 98%, or 99% identical to a target DNA sequence in the ZC3H12A gene (SEQ ID NO: 5) or the Zc3h12a gene (SEQ ID NO: 6). In some embodiments, the at least one ZC3H12A-targeting zinc finger binding domain binds to a target DNA sequence that is 100% identical to a target DNA sequence in the ZC3H12A gene (SEQ ID NO: 5) or the Zc3h12a gene (SEQ ID NO: 6).

[0234] In some embodiments, the at least one ZC3H12A-targeting zinc finger binding domain binds to a target DNA sequence that is at least 95%, 96%, 97%, 98%, or 99% identical to a DNA sequence defined by a set of genomic coordinates shown in Table 7 or Table 8. In some embodiments, the at least one ZC3H12A-targeting zinc finger binding domain binds to a target DNA sequence that is 100% identical to a DNA sequence defined by a set of genomic coordinates shown in Table 7 or Table 8. In some embodiments, the at least one ZC3H12A-targeting zinc finger binding domain binds to a target DNA sequence that is at least 95%, 96%, 97%, 98%, or 99% identical to one of SEQ ID NOs: 208-230. In some embodiments, the at least one ZC3H12A-targeting zinc finger binding domain binds to a target DNA sequence that is 100% identical to one of SEQ ID NOs: 208-230. Exemplary ZC3H12A target DNA sequences are shown in Tables 16 and 17.

[0235] In some embodiments, the at least one SOCS1-, PTPN2-, or ZC3H12A-targeting ZFP is obtained from a commercial suppliers such as Sigma Aldrich, Dharmacon, ThermoFisher, and the like. For example, in some embodiments, the at least one SOCS1, PTPN2, or ZC3H12A ZFP is one shown in Table 11.

TABLE 11
Exemplary SOCS1, PTPN2, and ZC3H12A Zinc Finger Systems

| Target Gene | Zinc Finger System |
|---|---|
| SOCS1 | CompoZr ® Knockout ZFN plasmid Human |
| | SOCS1 (NM_003745) (SigmaAldrich# |
| | CKOZFND20320) |
| | CompoZr ® Knockout ZFN plasmid Mouse |
| | Socs1 (NM_009896.2) (SigmaAldrich# |
| | CKOZFND41801) |
| PTPN2 | PTPN2 CompoZr ® Knockout ZFN human |
| | plasmid PTPN2 (NM_002828) |
| | (SigmaAldrich# CKOZFND17697) |
| | CompoZr ® Knockout ZFN murine |
| | plasmid Ptpn2 (NM_008977.3) |
| | (SigmaAldrich# CKOZFND39632) |
| ZC3H12A | CompoZr ® Knockout ZFN Kit, ZFN |
| | plasmid Human ZC3H12A (NM_25079) |
| | (SigmaAldrich# CKOZFND23094) |
| | CompoZr ® Knockout ZFN Kit, ZFN |
| | plasmid mouse Zc3h12a (NM_153159.2) |
| | (SigmaAldrich# CKOZFND44851) |

[0236] In some embodiments, the protein-based gene-regulating system comprises at least two ZFPs, wherein at least one ZFP comprises a SOCS1-targeting zinc finger binding domain and at least one ZFP comprises a PTPN2-targeting zinc finger binding domain. In some embodiments, the at least one SOCS1-targeting zinc finger binding domain binds to a target DNA sequence that is at least 95%, 96%, 97%, 98%, or 99% identical to a DNA sequence in the SOCS1 gene (SEQ ID NO: 1) or the Socs1 gene (SEQ ID NO: 2) and the at least one PTPN2-targeting zinc finger binding domain binds to a target DNA sequence that is at least 95%, 96%, 97%, 98%, or 99% identical to a DNA sequence the PTPN2 gene (SEQ ID NO: 3) or the Ptpn2 gene (SEQ ID NO: 4). In some embodiments, the at least one SOCS1-targeting zinc finger binding domain binds to a target DNA sequence that is 100% identical to a DNA sequence in the SOCS1 gene (SEQ ID NO: 1) or the Socs1 gene (SEQ ID NO: 2) and the at least one PTPN2-targeting zinc finger binding domain binds to a target DNA sequence that is 100% identical to a DNA sequence in the PTPN2 gene (SEQ ID NO: 3) or the Ptpn2 gene (SEQ ID NO: 4).

[0237] In some embodiments, the at least one SOCS1-targeting zinc finger binding domain binds to a target DNA sequence that is at least 95%, 96%, 97%, 98%, or 99% identical to a DNA sequence defined by a set of genomic coordinates shown in Table 3 or Table 4 and the at least one PTPN2-targeting zinc finger binding domain binds to a target DNA sequence that is at least 95%, 96%, 97%, 98%, or 99% identical to a DNA sequence defined by a set of genomic coordinates shown in Table 5 or Table 6. In some embodiments, the at least one SOCS1-targeting zinc finger binding domain binds to a target DNA sequence that is 100% identical to a DNA sequence defined by a set of genomic coordinates shown in Table 3 or Table 4 and the at least one PTPN2-targeting zinc finger binding domain binds to a target DNA sequence that is 100% identical to a DNA sequence defined by a set of genomic coordinates shown in Table 5 or Table 6.

[0238] In some embodiments, the at least one SOCS1-targeting zinc finger binding domain binds to a target DNA sequence that is at least 95%, 96%, 97%, 98%, or 99% identical to one of SEQ ID NOs: 7-151 and the at least one PTPN2-targeting zinc finger binding domain binds to a target DNA sequence that is at least 95%, 96%, 97%, 98%, or 99% identical to one of SEQ ID NOs: 185-207. In some embodiments, the at least one SOCS1-targeting zinc finger binding domain binds to a target DNA sequence that is 100% identical to one of SEQ ID NOs: 7-151 and the at least one PTPN2-targeting zinc finger binding domain binds to a target DNA sequence that is 100% identical to one of SEQ ID NOs: 185-207.

[0239] In some embodiments, the protein-based gene-regulating system comprises at least two ZFPs, wherein at least one ZFP comprises a SOCS1-targeting zinc finger binding domain and at least one ZFP comprises a ZC3H12A-targeting zinc finger binding domain. In some embodiments, the at least one SOCS1-targeting zinc finger binding domain binds to a target DNA sequence that is at least 95%, 96%, 97%, 98%, or 99% identical to a DNA sequence in the SOCS1 gene (SEQ ID NO: 1) or the Socs1 gene (SEQ ID NO: 2) and the at least one ZC3H12A-targeting zinc finger binding domain binds to a target DNA sequence that is at least 95%, 96%, 97%, 98%, or 99% identical to a DNA sequence in the ZC3H12A gene (SEQ ID NO: 5) or the Zc3h12a gene (SEQ ID NO: 6). In some embodiments, the at least one SOCS1-targeting zinc finger binding domain binds to a target DNA sequence that is 100% identical to a DNA sequence in the SOCS1 gene (SEQ ID NO: 1) or the Socs1 gene (SEQ ID NO: 2) and the at least one ZC3H12A-targeting zinc finger binding domain binds to a target DNA sequence that is 100% identical to a DNA sequence in the ZC3H12A gene (SEQ ID NO: 5) or the Zc3h12a gene (SEQ ID NO: 6).

[0240] In some embodiments, the at least one SOCS1-targeting zinc finger binding domain binds to a target DNA sequence that is at least 95%, 96%, 97%, 98%, or 99% identical to a DNA sequence defined by a set of genomic coordinates shown in Table 3 or Table 4 and the at least one ZC3H12A-targeting zinc finger binding domain binds to a target DNA sequence that is at least 95%, 96%, 97%, 98%, or 99% identical to a DNA sequence defined by a set of genomic coordinates shown in Table 7 or Table 8. In some embodiments, the at least one SOCS1-targeting zinc finger binding domain binds to a target DNA sequence that is 100% identical to a DNA sequence defined by a set of genomic coordinates shown in Table 3 or Table 4 and the at least one ZC3H12A-targeting zinc finger binding domain binds to a target DNA sequence that is 100% identical to a DNA sequence defined by a set of genomic coordinates shown in Table 7 or Table 8.

[0241] In some embodiments, the at least one SOCS1-targeting zinc finger binding domain binds to a target DNA sequence that is at least 95%, 96%, 97%, 98%, or 99% identical to one of SEQ ID NOs: 7-151 and the at least one ZC3H12A-targeting zinc finger binding domain binds to a target DNA sequence that is at least 95%, 96%, 97%, 98%, or 99% identical to one of SEQ ID NOs: 208-230. In some embodiments, the at least one SOCS1-targeting zinc finger binding domain binds to a target DNA sequence that is 100% identical to one of SEQ ID NOs: 7-151 and the at least one ZC3H12A-targeting zinc finger binding domain binds to a target DNA sequence that is 100% identical to one of SEQ ID NOs: 208-230.

[0242] In some embodiments, the protein-based gene-regulating system comprises at least two ZFPs, wherein at least one ZFP comprises a PTPN2-targeting zinc finger binding domain and at least one ZFP comprises a ZC3H12A-targeting zinc finger binding domain. In some embodiments, the at least one PTPN2-targeting zinc finger binding domain binds to a target DNA sequence that is at least 95%, 96%, 97%, 98%, or 99% identical to a DNA sequence in the PTPN2 gene (SEQ ID NO: 3) or the Ptpn2 gene (SEQ ID NO: 4) and the at least one ZC3H12A-targeting zinc finger binding domain binds to a target DNA sequence that is at least 95%, 96%, 97%, 98%, or 99% identical to a DNA sequence in the ZC3H12A gene (SEQ ID NO: 5) or the Zc3h12a gene (SEQ ID NO: 6). In some embodiments, the at least one PTPN2-targeting zinc finger binding domain binds to a target DNA sequence that is 100% identical to a DNA sequence in the PTPN2 gene (SEQ ID NO: 3) or the Ptpn2 gene (SEQ ID NO: 4) and the at least one ZC3H12A-targeting zinc finger binding domain binds to a target DNA sequence that is 100% identical to a DNA sequence in the ZC3H12A gene (SEQ ID NO: 5) or the Zc3h12a gene (SEQ ID NO: 6).

[0243] In some embodiments, the at least one PTPN2-targeting zinc finger binding domain binds to a target DNA sequence that is at least 95%, 96%, 97%, 98%, or 99% identical to a DNA sequence defined by a set of genomic coordinates shown in Table 5 or Table 6 and the at least one ZC3H12A-targeting zinc finger binding domain binds to a target DNA sequence that is at least 95%, 96%, 97%, 98%, or 99% identical to a DNA sequence defined by a set of genomic coordinates shown in Table 7 or Table 8. In some embodiments, the at least one PTPN2-targeting zinc finger binding domain binds to a target DNA sequence that is 100% identical to a DNA sequence defined by a set of genomic coordinates shown in Table 5 or Table 6 and the at least one ZC3H12A-targeting zinc finger binding domain binds to a target DNA sequence that is 100% identical to a DNA sequence defined by a set of genomic coordinates shown in Table 7 or Table 8.

[0244] In some embodiments, the at least one PTPN2-targeting zinc finger binding domain binds to a target DNA sequence that is at least 95%, 96%, 97%, 98%, or 99% identical to one of SEQ ID NOs: 185-207 and the at least one ZC3H12A-targeting zinc finger binding domain binds to a target DNA sequence that is at least 95%, 96%, 97%, 98%, or 99% identical to one of SEQ ID NOs: 208-230. In some embodiments, the at least one PTPN2-targeting zinc finger binding domain binds to a target DNA sequence that is 100% identical to one of SEQ ID NOs: 185-207 and the at least one ZC3H12A-targeting zinc finger binding domain binds to a target DNA sequence that is 100% identical to one of SEQ ID NOs: 208-230.

[0245] The enzymatic domain portion of the zinc finger fusion proteins can be obtained from any endo- or exonuclease. Exemplary endonucleases from which an enzymatic domain can be derived include, but are not limited to, restriction endonucleases and homing endonucleases. See, for example, 2002-2003 Catalogue, New England Biolabs, Beverly, Mass.; and Belfort et al. (1997) Nucleic Acids Res. 25:3379-3388. Additional enzymes which cleave DNA are known (e.g., 51 Nuclease; mung bean nuclease; pancreatic DNasel; micrococcal nuclease; yeast HO endonuclease; see also Linn et al. (eds.) Nucleases, Cold Spring Harbor Laboratory Press, 1993). One or more of these enzymes (or functional fragments thereof) can be used as a source of cleavage domains.

[0246] Exemplary restriction endonucleases (restriction enzymes) suitable for use as an enzymatic domain of the ZFPs described herein are present in many species and are capable of sequence-specific binding to DNA (at a recognition site), and cleaving DNA at or near the site of binding. Certain restriction enzymes (e.g., Type IIS) cleave DNA at sites removed from the recognition site and have separable binding and cleavage domains. For example, the Type IIS enzyme FokI catalyzes double-stranded cleavage of DNA, at 9 nucleotides from its recognition site on one strand and 13 nucleotides from its recognition site on the other. See, for example, U.S. Pat. Nos. 5,356,802; 5,436,150 and 5,487,994; as well as Li et al. (1992) Proc. Natl. Acad. Sci. USA 89:4275-4279; Li et al. (1993) Proc. Natl. Acad. Sci. USA 90:2764-2768; Kim et al. (1994a) Proc. Natl. Acad. Sci. USA 91:883-887; Kim et al. (1994b) J. Biol. Chem. 269:31,978-31,982. Thus, in one embodiment, fusion proteins comprise the enzymatic domain from at least one Type IIS restriction enzyme and one or more zinc finger binding domains.

[0247] An exemplary Type IIS restriction enzyme, whose cleavage domain is separable from the binding domain, is FokI. This particular enzyme is active as a dimer. Bitinaite et al. (1998) Proc. Natl. Acad. Sci. USA 95: 10,570-10,575. Thus, for targeted double-stranded DNA cleavage using zinc finger-FokI fusions, two fusion proteins, each comprising a FokI enzymatic domain, can be used to reconstitute a catalytically active cleavage domain. Alternatively, a single polypeptide molecule containing a zinc finger binding domain and two FokI enzymatic domains can also be used. Exemplary ZFPs comprising FokI enzymatic domains are described in U.S. Pat. No. 9,782,437.

### 2. TALEN Systems

[0248] In some embodiments, the present disclosure provides TALEN gene-regulating systems comprising two or more TALEN fusion proteins capable of reducing the expression and/or function of at least two endogenous genes selected from SOCS1, PTPN2, and ZC3H12A. In some embodiments, the present disclosure provides modified immune effector cells comprising such gene-regulating systems. TALEN-based systems comprise a TALEN fusion protein comprising a TAL effector DNA binding domain and an enzymatic domain. They are made by fusing a TAL effector DNA-binding domain to a DNA cleavage domain (a nuclease which cuts DNA strands). The FokI restriction enzyme described above is an exemplary enzymatic domain suitable for use in TALEN-based gene-regulating systems.

[0249] TAL effectors are proteins that are secreted by Xanthomonas bacteria via their type III secretion system when they infect plants. The DNA binding domain contains a repeated, highly conserved, 33-34 amino acid sequence with divergent 12th and 13th amino acids. These two positions, referred to as the Repeat Variable Diresidue (RVD), are highly variable and strongly correlated with specific nucleotide recognition. Therefore, the TAL effector domains can be engineered to bind specific target DNA sequences by selecting a combination of repeat segments containing the appropriate RVDs. The nucleic acid specificity for RVD combinations is as follows: HD targets cytosine, NI targets adenine, NG targets thymine, and NN targets guanine (though, in some embodiments, NN can also bind adenenine with lower specificity).

[0250] Methods and compositions for assembling the TAL-effector repeats are known in the art. See e.g., Cermak et al, Nucleic Acids Research, 39:12, 2011, e82. Plasmids for constructions of the TAL-effector repeats are commercially available from Addgene.

[0251] In some embodiments, the protein-based gene-regulating system comprises at least two TALEN fusion proteins, wherein at least one TALEN fusion protein comprises a SOCS1-targeting TAL effector domain. In some embodiments, the at least one SOCS1-targeting TAL effector domain binds to a target DNA sequence that is at least 95%, 96%, 97%, 98%, or 99% identical to a target DNA sequence in the SOCS1 gene (SEQ ID NO: 1) or the Socs1 gene (SEQ ID NO: 2). In some embodiments, the at least one SOCS1-targeting TAL effector domain binds to a target DNA sequence that is 100% identical to a target DNA sequence in the SOCS1 gene (SEQ ID NO: 1) or the Socs1 gene (SEQ ID NO: 1).

[0252] In some embodiments, the at least one SOCS1-targeting TAL effector domain binds to a target DNA sequence that is at least 95%, 96%, 97%, 98%, or 99% identical to a DNA sequence defined by a set of genomic coordinates shown in Table 3 or Table 4. In some embodiments, the at least one SOCS1-targeting TAL effector domain binds to a target DNA sequence that is 100% identical to a DNA sequence defined by a set of genomic coordinates shown in Table 3 or Table 4. In some embodiments, the at least one SOCS1-targeting TAL effector domain binds to a target DNA sequence that is at least 95%, 96%, 97%, 98%, or 99% identical to one of SEQ ID NOs: 7-151. In some embodiments, the at least one SOCS1-targeting TAL effector domain binds to a target DNA sequence that is 100% identical to one of SEQ ID NOs: 7-151. Exemplary SOCS1 target DNA sequences are shown in Tables 12 and 13.

[0253] In some embodiments, the protein-based gene-regulating system comprises at least two TALEN fusion proteins, wherein at least one TALEN fusion protein comprises a PTPN2-targeting TAL effector domain. In some embodiments, the at least one PTPN2-targeting TAL effector domain binds to a target DNA sequence that is at least 95%, 96%, 97%, 98%, or 99% identical to a target DNA sequence in the PTPN2 gene (SEQ ID NO: 3) or the Ptpn2 gene (SEQ ID NO: 4). In some embodiments, the at least one PTPN2-targeting TAL effector domain binds to a target DNA sequence that is 100% identical to a target DNA sequence in the PTPN2 gene (SEQ ID NO: 3) or the Ptpn2 gene (SEQ ID NO: 4).

[0254] In some embodiments, the at least one PTPN2-targeting TAL effector domain binds to a target DNA sequence that is at least 95%, 96%, 97%, 98%, or 99% identical to a DNA sequence defined by a set of genomic coordinates shown in Table 5 or Table 6. In some embodiments, the at least one PTPN2-targeting TAL effector domain binds to a target DNA sequence that is 100% identical to a DNA sequence defined by a set of genomic coordinates shown in Table 5 or Table 6. In some embodiments, the at least one PTPN2-targeting TAL effector domain binds to a target DNA sequence that is at least 95%, 96%, 97%, 98%, or 99% identical to one of SEQ ID NOs: 185-207. In some embodiments, the at least one PTPN2-targeting TAL effector domain binds to a target DNA sequence that is 100% identical to one of SEQ ID NOs: 185-207. Exemplary PTPN2 target DNA sequences are shown in Tables 14 and 15.

[0255] In some embodiments, the protein-based gene-regulating system comprises at least two TALEN fusion proteins, wherein at least one TALEN fusion protein comprises a ZC3H12A-targeting TAL effector domain. In some embodiments, the at least one ZC3H12A-targeting TAL effector domain binds to a target DNA sequence that is at least 95%, 96%, 97%, 98%, or 99% identical to a target DNA sequence in the ZC3H12A gene (SEQ ID NO: 5) or the Zc3h12a gene (SEQ ID NO: 6). In some embodiments, the at least one ZC3H12A-targeting TAL effector domain binds to a target DNA sequence that is 100% identical to a target DNA sequence in the ZC3H12A gene (SEQ ID NO: 5) or the Zc3h12a gene (SEQ ID NO: 6).

[0256] In some embodiments, the at least one ZC3H12A-targeting TAL effector domain binds to a target DNA sequence that is at least 95%, 96%, 97%, 98%, or 99% identical to a DNA sequence defined by a set of genomic coordinates shown in Table 7 or Table 8. In some embodiments, the at least one ZC3H12A-targeting TAL effector domain binds to a target DNA sequence that is 100% identical to a DNA sequence defined by a set of genomic coordinates shown in Table 7 or Table 8. In some embodiments, the at least one ZC3H12A-targeting TAL effector domain binds to a target DNA sequence that is at least 95%, 96%, 97%, 98%, or 99% identical to one of SEQ ID NOs: 208-230. In some embodiments, the at least one ZC3H12A-targeting TAL effector domain binds to a target DNA sequence that is 100% identical to one of SEQ ID NOs: 208-230. Exemplary ZC3H12A target DNA sequences are shown in Tables 16 and 17.

[0257] In some embodiments, the protein-based gene-regulating system comprises at least two TAL fusion proteins, wherein at least one TALEN fusion protein comprises a SOCS1-targeting TAL effector domain and at least one TALEN fusion protein comprises a PTPN2-targeting TAL effector domain. In some embodiments, the at least one SOCS1-targeting TAL effector domain binds to a target DNA sequence that is at least 95%, 96%, 97%, 98%, or 99% identical to a DNA sequence in the SOCS1 gene (SEQ ID NO: 1) or the Socs1 gene (SEQ ID NO: 2) and the at least one PTPN2-targeting TAL effector domain binds to a target DNA sequence that is at least 95%, 96%, 97%, 98%, or 99% identical to a DNA sequence the PTPN2 gene (SEQ ID NO: 3) or the Ptpn2 gene (SEQ ID NO: 4). In some embodiments, the at least one SOCS1-targeting TAL effector domain binds to a target DNA sequence that is 100% identical to a DNA sequence in the SOCS1 gene (SEQ ID NO: 1) or the Socs1 gene (SEQ ID NO: 2) and the at least one PTPN2-targeting TAL effector domain binds to a target DNA sequence that is 100% identical to a DNA sequence in the PTPN2 gene (SEQ ID NO: 3) or the Ptpn2 gene (SEQ ID NO: 4).

[0258] In some embodiments, the at least one SOCS1-targeting TAL effector domain binds to a target DNA sequence that is at least 95%, 96%, 97%, 98%, or 99% identical to a DNA sequence defined by a set of genomic coordinates shown in Table 3 or Table 4 and the at least one PTPN2-targeting TAL effector domain binds to a target DNA sequence that is at least 95%, 96%, 97%, 98%, or 99% identical to a DNA sequence defined by a set of genomic coordinates shown in Table 5 or Table 6. In some embodiments, the at least one SOCS1-targeting TAL effector domain binds to a target DNA sequence that is 100% identical to a DNA sequence defined by a set of genomic coordinates shown in Table 3 or Table 4 and the at least one PTPN2-targeting TAL effector domain binds to a target DNA sequence that is 100% identical to a DNA sequence defined by a set of genomic coordinates shown in Table 5 or Table 6.

[0259] In some embodiments, the at least one SOCS1-targeting TAL effector domain binds to a target DNA sequence that is at least 95%, 96%, 97%, 98%, or 99% identical to one of SEQ ID NOs: 7-151 and the at least one PTPN2-targeting TAL effector domain binds to a target DNA sequence that is at least 95%, 96%, 97%, 98%, or 99% identical to one of SEQ ID NOs: 185-207. In some embodiments, the at least one SOCS1-targeting TAL effector domain binds to a target DNA sequence that is 100% identical to one of SEQ ID NOs: 7-151 and the at least one PTPN2-targeting TAL effector domain binds to a target DNA sequence that is 100% identical to one of SEQ ID NOs: 185-207.

[0260] In some embodiments, the protein-based gene-regulating system comprises at least two TALEN fusion proteins, wherein at least one TALEN fusion protein comprises a SOCS1-targeting TAL effector domain and at least one TALEN fusion protein comprises a ZC3H12A-targeting TAL effector domain. In some embodiments, the at least one SOCS1-targeting TAL effector domain binds to a target DNA sequence that is at least 95%, 96%, 97%, 98%, or 99% identical to a DNA sequence in the SOCS1 gene (SEQ ID NO: 1) or the Socs1 gene (SEQ ID NO: 2) and the at least one ZC3H12A-targeting TAL effector domain binds to a target DNA sequence that is at least 95%, 96%, 97%, 98%, or 99% identical to a DNA sequence in the ZC3H12A gene (SEQ ID NO: 5) or the Zc3h12a gene (SEQ ID NO: 6). In some embodiments, the at least one SOCS1-targeting TAL effector domain binds to a target DNA sequence that is 100% identical to a DNA sequence in the SOCS1 gene (SEQ ID NO: 1) or the Socs1 gene (SEQ ID NO: 2) and the at least one ZC3H12A-targeting TAL effector domain binds to a target DNA sequence that is 100% identical to a DNA sequence in the ZC3H12A gene (SEQ ID NO: 5) or the Zc3h12a gene (SEQ ID NO: 6).

[0261] In some embodiments, the at least one SOCS1-targeting TAL effector domain binds to a target DNA sequence that is at least 95%, 96%, 97%, 98%, or 99% identical to a DNA sequence defined by a set of genomic coordinates shown in Table 3 or Table 4 and the at least one ZC3H12A-targeting TAL effector domain binds to a target DNA sequence that is at least 95%, 96%, 97%, 98%, or 99% identical to a DNA sequence defined by a set of genomic coordinates shown in Table 7 or Table 8. In some embodiments, the at least one SOCS1-targeting TAL effector domain binds to a target DNA sequence that is 100% identical to a DNA sequence defined by a set of genomic coordinates shown in Table 3 or Table 4 and the at least one ZC3H12A-targeting TAL effector domain binds to a target DNA sequence that is 100% identical to a DNA sequence defined by a set of genomic coordinates shown in Table 7 or Table 8.

[0262] In some embodiments, the at least one SOCS1-targeting TAL effector domain binds to a target DNA sequence that is at least 95%, 96%, 97%, 98%, or 99% identical to one of SEQ ID NOs: 7-151 and the at least one ZC3H12A-targeting TAL effector domain binds to a target DNA sequence that is at least 95%, 96%, 97%, 98%, or 99% identical to one of SEQ ID NOs: 208-230. In some embodiments, the at least one SOCS1-targeting TAL effector domain binds to a target DNA sequence that is 100% identical to one of SEQ ID NOs: 7-151 and the at least one ZC3H12A-targeting TAL effector domain binds to a target DNA sequence that is 100% identical to one of SEQ ID NOs: 208-230.

[0263] In some embodiments, the protein-based gene-regulating system comprises at least two TALEN fusion proteins, wherein at least one TALEN fusion protein comprises a PTPN2-targeting TAL effector domain and at least one TALEN fusion protein comprises a ZC3H12A-targeting TAL effector domain. In some embodiments, the at least one PTPN2-targeting TAL effector domain binds to a target DNA sequence that is at least 95%, 96%, 97%, 98%, or 99% identical to a DNA sequence in the PTPN2 gene (SEQ ID NO: 3) or the Ptpn2 gene (SEQ ID NO: 4) and the at least one ZC3H12A-targeting TAL effector domain binds to a target DNA sequence that is at least 95%, 96%, 97%, 98%, or 99% identical to a DNA sequence in the ZC3H12A gene (SEQ ID NO: 5) or the Zc3h12a gene (SEQ ID NO: 6). In some embodiments, the at least one PTPN2-targeting TAL effector domain binds to a target DNA sequence that is 100% identical to a DNA sequence in the PTPN2 gene (SEQ ID NO: 3) or the Ptpn2 gene (SEQ ID NO: 4) and the at least one ZC3H12A-targeting TAL effector domain binds to a target DNA sequence that is 100% identical to a DNA sequence in the ZC3H12A gene (SEQ ID NO: 5) or the Zc3h12a gene (SEQ ID NO: 6).

[0264] In some embodiments, the at least one PTPN2-targeting TAL effector domain binds to a target DNA sequence that is at least 95%, 96%, 97%, 98%, or 99% identical to a DNA sequence defined by a set of genomic coordinates shown in Table 5 or Table 6 and the at least one ZC3H12A-targeting TAL effector domain binds to a target DNA sequence that is at least 95%, 96%, 97%, 98%, or 99% identical to a DNA sequence defined by a set of genomic coordinates shown in Table 7 or Table 8. In some embodiments, the at least one PTPN2-targeting TAL effector domain binds to a target DNA sequence that is 100% identical to a DNA sequence defined by a set of genomic coordinates shown in Table 5 or Table 6 and the at least one ZC3H12A-targeting TAL effector domain binds to a target DNA sequence that is 100% identical to a DNA sequence defined by a set of genomic coordinates shown in Table 7 or Table 8.

[0265] In some embodiments, the at least one PTPN2-targeting TAL effector domain binds to a target DNA sequence that is at least 95%, 96%, 97%, 98%, or 99% identical to one of SEQ ID NOs: 185-207 and the at least one ZC3H12A-targeting TAL effector domain binds to a target DNA sequence that is at least 95%, 96%, 97%, 98%, or 99% identical to one of SEQ ID NOs: 208-230. In some embodiments, the at least one PTPN2-targeting TAL effector domain binds to a target DNA sequence that is 100% identical to one of SEQ ID NOs: 185-207 and the at least one ZC3H/2A-targeting TAL effector domain binds to a target DNA sequence that is 100% identical to one of SEQ ID NOs: 208-230.

### C. Combination Nucleic Acid/Protein-Based Gene-Regulating Systems

[0266] Combination gene-regulating systems comprise a site-directed modifying polypeptide and a nucleic acid guide molecule. Herein, a “site-directed modifying polypeptide” refers to a polypeptide that binds to a nucleic acid guide molecule, is targeted to a target nucleic acid sequence, (for example, an endogenous target DNA or RNA sequence) by the nucleic acid guide molecule to which it is bound, and modifies the target nucleic acid sequence (e.g., cleavage, mutation, or methylation of a target nucleic acid sequence).

[0267] A site-directed modifying polypeptide comprises two portions, a portion that binds the nucleic acid guide and an activity portion. In some embodiments, a site-directed modifying polypeptide comprises an activity portion that exhibits site-directed enzymatic activity (e.g., DNA methylation, DNA or RNA cleavage, histone acetylation, histone methylation, etc.), wherein the site of enzymatic activity is determined by the guide nucleic acid. In some cases, a site-directed modifying polypeptide comprises an activity portion that has enzymatic activity that modifies the endogenous target nucleic acid sequence (e.g., nuclease activity, methyltransferase activity, demethylase activity, DNA repair activity, DNA damage activity, deamination activity, dismutase activity, alkylation activity, depurination activity, oxidation activity, pyrimidine dimer forming activity, integrase activity, transposase activity, recombinase activity, polymerase activity, ligase activity, helicase activity, photolyase activity or glycosylase activity). In other cases, a site-directed modifying polypeptide comprises an activity portion that has enzymatic activity that modifies a polypeptide (e.g., a histone) associated with the endogenous target nucleic acid sequence (e.g., methyltransferase activity, demethylase activity, acetyltransferase activity, deacetylase activity, kinase activity, phosphatase activity, ubiquitin ligase activity, deubiquitinating activity, adenylation activity, deadenylation activity, SUMOylating activity, deSUMOylating activity, ribosylation activity, deribosylation activity, myristoylation activity or demyristoylation activity). In some embodiments, a site-directed modifying polypeptide comprises an activity portion that modulates transcription of a target DNA sequence (e.g., to increase or decrease transcription). In some embodiments, a site-directed modifying polypeptide comprises an activity portion that modulates expression or translation of a target RNA sequence (e.g., to increase or decrease transcription).

[0268] The nucleic acid guide comprises two portions: a first portion that is complementary to, and capable of binding with, an endogenous target nucleic sequence (referred to herein as a “nucleic acid-binding segment”), and a second portion that is capable of interacting with the site-directed modifying polypeptide (referred to herein as a “protein-binding segment”). In some embodiments, the nucleic acid-binding segment and protein-binding segment of a nucleic acid guide are comprised within a single polynucleotide molecule. In some embodiments, the nucleic acid-binding segment and protein-binding segment of a nucleic acid guide are each comprised within separate polynucleotide molecules, such that the nucleic acid guide comprises two polynucleotide molecules that associate with each other to form the functional guide.

[0269] The nucleic acid guide mediates the target specificity of the combined protein/nucleic acid gene-regulating systems by specifically hybridizing with a target nucleic acid sequence. In some embodiments, the target nucleic acid sequence is an RNA sequence, such as an RNA sequence comprised within an mRNA transcript of a target gene. In some embodiments, the target nucleic acid sequence is a DNA sequence comprised within the DNA sequence of a target gene. Reference herein to a target gene encompasses the full-length DNA sequence for that particular gene which comprises a plurality of target genetic loci (i.e., portions of a particular target gene sequence (e.g., an exon or an intron)). Within each target genetic loci are shorter stretches of DNA sequences referred to herein as “target DNA sequences” that can be modified by the gene-regulating systems described herein. Further, each target genetic loci comprises a “target modification site,” which refers to the precise location of the modification induced by the gene-regulating system (e.g., the location of an insertion, a deletion, or mutation, the location of a DNA break, or the location of an epigenetic modification). The gene-regulating systems described herein may comprise 2 or more nucleic acid guides (e.g., 2, 3, 4, 5, 6, 7, 8, 9, 10, or more nucleic acid guides).

[0270] In some embodiments, the combined protein/nucleic acid gene-regulating systems comprise site-directed modifying polypeptides derived from Argonaute (Ago) proteins (e.g., T. thermophiles Ago or TtAgo). In such embodiments, the site-directed modifying polypeptide is a T. thermophiles Ago DNA endonuclease and the nucleic acid guide is a guide DNA (gDNA) (See, Swarts et al., Nature 507 (2014), 258-261). In some embodiments, the present disclosure provides a polynucleotide encoding a gDNA. In some embodiments, a gDNA-encoding nucleic acid is comprised in an expression vector, e.g., a recombinant expression vector. In some embodiments, the present disclosure provides a polynucleotide encoding a TtAgo site-directed modifying polypeptide or variant thereof. In some embodiments, the polynucleotide encoding a TtAgo site-directed modifying polypeptide is comprised in an expression vector, e.g., a recombinant expression vector.

[0271] In some embodiments, the gene editing systems described herein are CRISPR (Clustered Regularly Interspaced Short Palindromic Repeats)/Cas (CRISPR Associated) nuclease systems. In some embodiments, the CRISPR/Cas system is a Class 2 system. Class 2 CRISPR/Cas systems are divided into three types: Type II, Type V, and Type VI systems. In some embodiments, the CRISPR/Cas system is a Class 2 Type II system, utilizing the Cas9 protein. In such embodiments, the site-directed modifying polypeptide is a Cas9 DNA endonuclease (or variant thereof) and the nucleic acid guide molecule is a guide RNA (gRNA). In some embodiments, the CRISPR/Cas system is a Class 2 Type V system, utilizing the Cas12 proteins (e.g., Cas12a (also known as Cpf1), Cas12b (also known as C2c1), Cas12c (also known as C2c3), Cas12d (also known as CasY), and Cas12e (also known as CasX)). In such embodiments, the site-directed modifying polypeptide is a Cas12 DNA endonuclease (or variant thereof) and the nucleic acid guide molecule is a gRNA. In some embodiments, the CRISPR/Cas system is a Class 2 and Type VI system, utilizing the Cas13 proteins (e.g., Cas13a (also known as C2c2), Cas13b, and Cas13c). (See, Pyzocha et al., ACS Chemical Biology, 13(2), 347-356). In such embodiments, the site-directed modifying polypeptide is a Cas13 RNA riboendonuclease and the nucleic acid guide molecule is a gRNA.

[0272] A Cas polypeptide refers to a polypeptide that can interact with a gRNA molecule and, in concert with the gRNA molecule, home or localize to a target DNA or target RNA sequence. Cas polypeptides include naturally occurring Cas proteins and engineered, altered, or otherwise modified Cas proteins that differ by one or more amino acid residues from a naturally-occurring Cas sequence.

[0273] A guide RNA (gRNA) comprises two segments, a DNA-binding segment and a protein-binding segment. In some embodiments, the protein-binding segment of a gRNA is comprised in one RNA molecule and the DNA-binding segment is comprised in another separate RNA molecule. Such embodiments are referred to herein as “double-molecule gRNAs” or “two-molecule gRNA” or “dual gRNAs.” In some embodiments, the gRNA is a single RNA molecule and is referred to herein as a “single-guide RNA” or an “sgRNA.” The term “guide RNA” or “gRNA” is inclusive, referring both to two-molecule guide RNAs and sgRNAs.

[0274] The protein-binding segment of a gRNA comprises, in part, two complementary stretches of nucleotides that hybridize to one another to form a double stranded RNA duplex (dsRNA duplex), which facilitates binding to the Cas protein. The nucleic acid-binding segment (or “nucleic acid-binding sequence”) of a gRNA comprises a nucleotide sequence that is complementary to and capable of binding to a specific target nucleic acid sequence. The protein-binding segment of the gRNA interacts with a Cas polypeptide and the interaction of the gRNA molecule and site-directed modifying polypeptide results in Cas binding to the endogenous nucleic acid sequence and produces one or more modifications within or around the target nucleic acid sequence. The precise location of the target modification site is determined by both (i) base-pairing complementarity between the gRNA and the target nucleic acid sequence; and (ii) the location of a short motif, referred to as the protospacer adjacent motif (PAM), in the target DNA sequence (referred to as a protospacer flanking sequence (PFS) in target RNA sequences). The PAM/PFS sequence is required for Cas binding to the target nucleic acid sequence. A variety of PAM/PFS sequences are known in the art and are suitable for use with a particular Cas endonuclease (e.g., a Cas9 endonuclease). (See e.g., Nat Methods. 2013 November; 10(11): 1116-1121 and Sci Rep. 2014; 4: 5405). In some embodiments, the PAM sequence is located within 50 base pairs of the target modification site in a target DNA sequence. In some embodiments, the PAM sequence is located within 10 base pairs of the target modification site in a target DNA sequence. The DNA sequences that can be targeted by this method are limited only by the relative distance of the PAM sequence to the target modification site and the presence of a unique 20 base pair sequence to mediate sequence-specific, gRNA-mediated Cas binding. In some embodiments, the PFS sequence is located at the 3′ end of the target RNA sequence. In some embodiments, the target modification site is located at the 5′ terminus of the target locus. In some embodiments, the target modification site is located at the 3′ end of the target locus. In some embodiments, the target modification site is located within an intron or an exon of the target locus.

[0275] In some embodiments, the present disclosure provides a polynucleotide encoding a gRNA. In some embodiments, a gRNA-encoding nucleic acid is comprised in an expression vector, e.g., a recombinant expression vector. In some embodiments, the present disclosure provides a polynucleotide encoding a site-directed modifying polypeptide. In some embodiments, the polynucleotide encoding a site-directed modifying polypeptide is comprised in an expression vector, e.g., a recombinant expression vector.

### 1. Cas Proteins

[0276] In some embodiments, the site-directed modifying polypeptide is a Cas protein. Cas molecules of a variety of species can be used in the methods and compositions described herein, including Cas molecules derived from S. pyogenes, S. aureus, N. meningitidis, S. thermophiles, Acidovorax avenae, Actinobacillus pleuropneumonias, Actinobacillus succinogenes, Actinobacillus suis, Actinomyces sp., Cycliphilusdenitrificans, Aminomonas paucivorans, Bacillus cereus, Bacillus smithii, Bacillus thuringiensis, Bacteroides sp., Blastopirellula marina, Bradyrhizobium sp., Brevibacillus laterospoxus, Campylobacter coli, Campylobacter jejuni, Campylobacter lari, Candidatus puniceispirillum, Clostridium cellulolyticum, Clostridium perfringens, Corynebacterium accolens, Corynebacterium diphtheria, Corynebacterium matruchotii, Dinoroseobacter shibae, Eubacterium dolichum, Gammaproteobacterium, Gluconacetobacter diazotrophicus, Haemophilus parainfluenzae, Haemophilus sputomm, Helicobacter canadensis, Helicobacter cinaedi, Helicobacter mustelae, Ilyobacter polytropus, Kingella kingae, Lactobacillus crispatus, Listeria ivanovii, Listeria monocytogenes, Listeriaceae bacterium, Methylocystis sp., Methylosinus trichosporium, Mobiluncus mulieris, Neisseria bacilliformis, Neisseria cinerea, Neisseria flavescens, Neisseria lactamica, Neisseria meningitidis, Neisseria sp., Neisseria wadsworthii, Nitrosomonas sp., Parvibaculum lavamentivorans, Pasteurella multocida, Phascolarctobacterium succinatutens, Ralstonia syzygii, Rhodopseudomonas palustris, Rhodovulum sp., Simonsiella muelleri, Sphingomonas sp., Sporolactobacillus vineae, Staphylococcus aureus, Staphylococcus lugdunensis, Streptococcus sp., Subdoligranulum sp., Tistrella mobilis, Treponema sp., or Verminephrobacter eiseniae.

[0277] In some embodiments, the Cas protein is a naturally-occurring Cas protein. In some embodiments, the Cas endonuclease is selected from the group consisting of C2C1, C2C3, Cpf1 (also referred to as Cas12a), Cas12b, Cas12c, Cas12d, Cas12e, Cas13a, Cas13b, Cas13c, Cas13d, Cas1, Cas1B, Cas2, Cas3, Cas4, Cas5, Cash, Cas7, Cas8, Cas9 (also known as Csn1 and Csx12), Cas10, Csy1, Csy2, Csy3, Cse1, Cse2, Csc1, Csc2, Csa5, Csn2, Csm2, Csm3, Csm4, Csm5, Csm6, Cmr1, Cmr3, Cmr4, Cmr5, Cmr6, Csb1, Csb2, Csb3, Csx17, Csx14, Csx10, Csx16, CsaX, Csx3, Csx1, Csx15, Csf1, Csf2, Csf3, and Csf4.

[0278] In some embodiments, the Cas protein is an endoribonuclease such as a Cas13 protein. In some embodiments, the Cas13 protein is a Cas13a (Abudayyeh et al., Nature 550 (2017), 280-284), Cas13b (Cox et al., Science (2017) 358:6336, 1019-1027), Cas13c (Cox et al., Science (2017) 358:6336, 1019-1027), or Cas13d (Zhang et al., Cell 175 (2018), 212-223) protein.

[0279] In some embodiments, the Cas protein is a wild-type or naturally occurring Cas9 protein or a Cas9 ortholog. Wild-type Cas9 is a multi-domain enzyme that uses an HNH nuclease domain to cleave the target strand of DNA and a RuvC-like domain to cleave the non-target strand. Binding of WT Cas9 to DNA based on gRNA specificity results in double-stranded DNA breaks that can be repaired by non-homologous end joining (NHEJ) or homology-directed repair (HDR). Exemplary naturally occurring Cas9 molecules are described in Chylinski et al., RNA Biology 2013 10:5, 727-737 and additional Cas9 orthologs are described in International PCT Publication No. WO 2015/071474. Such Cas9 molecules include Cas9 molecules of a cluster 1 bacterial family, cluster 2 bacterial family, cluster 3 bacterial family, cluster 4 bacterial family, cluster 5 bacterial family, cluster 6 bacterial family, a cluster 7 bacterial family, a cluster 8 bacterial family, a cluster 9 bacterial family, a cluster 10 bacterial family, a cluster 11 bacterial family, a cluster 12 bacterial family, a cluster 13 bacterial family, a cluster 14 bacterial family, a cluster 15 bacterial family, a cluster 16 bacterial family, a cluster 17 bacterial family, a cluster 18 bacterial family, a cluster 19 bacterial family, a cluster 20 bacterial family, a cluster 21 bacterial family, a cluster 22 bacterial family, a cluster 23 bacterial family, a cluster 24 bacterial family, a cluster 25 bacterial family, a cluster 26 bacterial family, a cluster 27 bacterial family, a cluster 28 bacterial family, a cluster 29 bacterial family, a cluster 30 bacterial family, a cluster 31 bacterial family, a cluster 32 bacterial family, a cluster 33 bacterial family, a cluster 34 bacterial family, a cluster 35 bacterial family, a cluster 36 bacterial family, a cluster 37 bacterial family, a cluster 38 bacterial family, a cluster 39 bacterial family, a cluster 40 bacterial family, a cluster 41 bacterial family, a cluster 42 bacterial family, a cluster 43 bacterial family, a cluster 44 bacterial family, a cluster 45 bacterial family, a cluster 46 bacterial family, a cluster 47 bacterial family, a cluster 48 bacterial family, a cluster 49 bacterial family, a cluster 50 bacterial family, a cluster 51 bacterial family, a cluster 52 bacterial family, a cluster 53 bacterial family, a cluster 54 bacterial family, a cluster 55 bacterial family, a cluster 56 bacterial family, a cluster 57 bacterial family, a cluster 58 bacterial family, a cluster 59 bacterial family, a cluster 60 bacterial family, a cluster 61 bacterial family, a cluster 62 bacterial family, a cluster 63 bacterial family, a cluster 64 bacterial family, a cluster 65 bacterial family, a cluster 66 bacterial family, a cluster 67 bacterial family, a cluster 68 bacterial family, a cluster 69 bacterial family, a cluster 70 bacterial family, a cluster 71 bacterial family, a cluster 72 bacterial family, a cluster 73 bacterial family, a cluster 74 bacterial family, a cluster 75 bacterial family, a cluster 76 bacterial family, a cluster 77 bacterial family, or a cluster 78 bacterial family.

[0280] In some embodiments, the naturally occurring Cas9 polypeptide is selected from the group consisting of SpCas9, SpCas9-HF1, SpCas9-HF2, SpCas9-HF3, SpCas9-HF4, SaCas9, FnCpf, FnCas9, eSpCas9, and NmeCas9. In some embodiments, the Cas9 protein comprises an amino acid sequence having at least 60%, 65%, 70%, 75%, 80%, 85%, 90%, 95%, 96%, 97%, 98%, 99%, or 100% sequence identity to a Cas9 amino acid sequence described in Chylinski et al., RNA Biology 2013 10:5, 727-737; Hou et al., PNAS Early Edition 2013, 1-6).

[0281] In some embodiments, the Cas polypeptide comprises one or more of the following activities:

[0282] (a) a nickase activity, i.e., the ability to cleave a single strand, e.g., the non-complementary strand or the complementary strand, of a nucleic acid molecule;

[0283] (b) a double stranded nuclease activity, i.e., the ability to cleave both strands of a double stranded nucleic acid and create a double stranded break, which in an embodiment is the presence of two nickase activities;

[0284] (c) an endonuclease activity;

[0285] (d) an exonuclease activity; and/or

[0286] (e) a helicase activity, i.e., the ability to unwind the helical structure of a double stranded nucleic acid.

[0287] In some embodiments, the Cas polypeptide is fused to heterologous proteins that recruit DNA-damage signaling proteins, exonucleases, or phosphatases to further increase the likelihood or the rate of repair of the target sequence by one repair mechanism or another. In some embodiments, a WT Cas polypeptide is co-expressed with a nucleic acid repair template to facilitate the incorporation of an exogenous nucleic acid sequence by homology-directed repair.

[0288] In some embodiments, different Cas proteins (i.e., Cas9 proteins from various species) may be advantageous to use in the various provided methods in order to capitalize on various enzymatic characteristics of the different Cas proteins (e.g., for different PAM sequence preferences; for increased or decreased enzymatic activity; for an increased or decreased level of cellular toxicity; to change the balance between NHEJ, homology-directed repair, single strand breaks, double strand breaks, etc.).

[0289] In some embodiments, the Cas protein is a Cas9 protein derived from S. pyogenes and recognizes the PAM sequence motif NGG, NAG, NGA (Mali et al, Science 2013; 339(6121): 823-826). In some embodiments, the Cas protein is a Cas9 protein derived from S. thermophiles and recognizes the PAM sequence motif NGGNG and/or NNAGAAW (W=A or T) (See, e.g., Horvath et al, Science, 2010; 327(5962): 167-170, and Deveau et al, J Bacteriol 2008; 190(4): 1390-1400). In some embodiments, the Cas protein is a Cas9 protein derived from S. mutans and recognizes the PAM sequence motif NGG and/or NAAR (R=A or G) (See, e.g., Deveau et al, J BACTERIOL 2008; 190(4): 1390-1400). In some embodiments, the Cas protein is a Cas9 protein derived from S. aureus and recognizes the PAM sequence motif NNGRR (R=A or G). In some embodiments, the Cas protein is a Cas9 protein derived from S. aureus and recognizes the PAM sequence motif N GRRT (R=A or G). In some embodiments, the Cas protein is a Cas9 protein derived from S. aureus and recognizes the PAM sequence motif N GRRV (R=A or G). In some embodiments, the Cas protein is a Cas9 protein derived from N. meningitidis and recognizes the PAM sequence motif N GATT or N GCTT (R=A or G, V=A, G or C) (See, e.g., Hou et ah, PNAS 2013, 1-6). In the aforementioned embodiments, N can be any nucleotide residue, e.g., any of A, G, C or T. In some embodiments, the Cas protein is a Cas13a protein derived from Leptotrichia shahii and recognizes the PFS sequence motif of a single 3′ A, U, or C.

[0290] In some embodiments, a polynucleotide encoding a Cas protein is provided. In some embodiments, the polynucleotide encodes a Cas protein that is at least 90% identical to a Cas protein described in International PCT Publication No. WO 2015/071474 or Chylinski et al., RNA Biology 2013 10:5, 727-737. In some embodiments, the polynucleotide encodes a Cas protein that is at least 95%, 96%, 97%, 98%, or 99% identical to a Cas protein described in International PCT Publication No. WO 2015/071474 or Chylinski et al., RNA Biology 2013 10:5, 727-737. In some embodiments, the polynucleotide encodes a Cas protein that is 100% identical to a Cas protein described in International PCT Publication No. WO 2015/071474 or Chylinski et al., RNA Biology 2013 10:5, 727-737.

### 2. Cas Mutants

[0291] In some embodiments, the Cas polypeptides are engineered to alter one or more properties of the Cas polypeptide. For example, in some embodiments, the Cas polypeptide comprises altered enzymatic properties, e.g., altered nuclease activity, (as compared with a naturally occurring or other reference Cas molecule) or altered helicase activity. In some embodiments, an engineered Cas polypeptide can have an alteration that alters its size, e.g., a deletion of amino acid sequence that reduces its size without significant effect on another property of the Cas polypeptide. In some embodiments, an engineered Cas polypeptide comprises an alteration that affects PAM recognition. For example, an engineered Cas polypeptide can be altered to recognize a PAM sequence other than the PAM sequence recognized by the corresponding wild-type Cas protein.

[0292] Cas polypeptides with desired properties can be made in a number of ways, including alteration of a naturally occurring Cas polypeptide or parental Cas polypeptide, to provide a mutant or altered Cas polypeptide having a desired property. For example, one or more mutations can be introduced into the sequence of a parental Cas polypeptide (e.g., a naturally occurring or engineered Cas polypeptide). Such mutations and differences may comprise substitutions (e.g., conservative substitutions or substitutions of non-essential amino acids); insertions; or deletions. In some embodiments, a mutant Cas polypeptide comprises one or more mutations (e.g., at least 1, 2, 3, 4, 5, 10, 15, 20, 30, 40 or 50 mutations) relative to a parental Cas polypeptide.

[0293] In an embodiment, a mutant Cas polypeptide comprises a cleavage property that differs from a naturally occurring Cas polypeptide. In some embodiments, the Cas is a deactivated Cas (dCas) mutant. In such embodiments, the Cas polypeptide does not comprise any intrinsic enzymatic activity and is unable to mediate target nucleic acid cleavage. In such embodiments, the dCas may be fused with a heterologous protein that is capable of modifying the target nucleic acid in a non-cleavage based manner. For example, in some embodiments, a dCas protein is fused to transcription activator or transcription repressor domains (e.g., the Kruppel associated box (KRAB or SKD); the Mad mSIN3 interaction domain (SID or SID4X); the ERF repressor domain (ERD); the MAX-interacting protein 1 (MXI1); methyl-CpG binding protein 2 (MECP2); etc.). In some such cases, the dCas fusion protein is targeted by the gRNA to a specific location (i.e., sequence) in the target nucleic acid and exerts locus-specific regulation such as blocking RNA polymerase binding to a promoter (which selectively inhibits transcription activator function), and/or modifying the local chromatin status (e.g., when a fusion sequence is used that modifies the target DNA or modifies a polypeptide associated with the target DNA). In some cases, the changes are transient (e.g., transcription repression or activation). In some cases, the changes are inheritable (e.g., when epigenetic modifications are made to the target DNA or to proteins associated with the target DNA, e.g., nucleosomal histones).

[0294] In some embodiments, the dCas is a dCas13 mutant (Konermann et al., Cell 173 (2018), 665-676). These dCas13 mutants can then be fused to enzymes that modify RNA, including adenosine deaminases (e.g., ADAR1 and ADAR2). Adenosine deaminases convert adenine to inosine, which the translational machinery treats like guanine, thereby creating a functional A→G change in the RNA sequence. In some embodiments, the dCas is a dCas9 mutant.

[0295] In some embodiments, the mutant Cas9 is a Cas9 nickase mutant. Cas9 nickase mutants comprise only one catalytically active domain (either the HNH domain or the RuvC domain). The Cas9 nickase mutants retain DNA binding based on gRNA specificity, but are capable of cutting only one strand of DNA resulting in a single-strand break (e.g. a “nick”). In some embodiments, two complementary Cas9 nickase mutants (e.g., one Cas9 nickase mutant with an inactivated RuvC domain, and one Cas9 nickase mutant with an inactivated HNH domain) are expressed in the same cell with two gRNAs corresponding to two respective target sequences; one target sequence on the sense DNA strand, and one on the antisense DNA strand. This dual-nickase system results in staggered double stranded breaks and can increase target specificity, as it is unlikely that two off-target nicks will be generated close enough to generate a double stranded break. In some embodiments, a Cas9 nickase mutant is co-expressed with a nucleic acid repair template to facilitate the incorporation of an exogenous nucleic acid sequence by homology-directed repair.

[0296] In some embodiments, the Cas polypeptides described herein can be engineered to alter the PAM/PFS specificity of the Cas polypeptide. In some embodiments, a mutant Cas polypeptide has a PAM/PFS specificity that is different from the PAM/PFS specificity of the parental Cas polypeptide. For example, a naturally occurring Cas protein can be modified to alter the PAM/PFS sequence that the mutant Cas polypeptide recognizes to decrease off target sites, improve specificity, or eliminate a PAM/PFS recognition requirement. In some embodiments, a Cas protein can be modified to increase the length of the PAM/PFS recognition sequence. In some embodiments, the length of the PAM recognition sequence is at least 4, 5, 6, 7, 8, 9, 10 or 15 amino acids in length. Cas polypeptides that recognize different PAM/PFS sequences and/or have reduced off-target activity can be generated using directed evolution. Exemplary methods and systems that can be used for directed evolution of Cas polypeptides are described, e.g., in Esvelt et al. Nature 2011, 472(7344): 499-503.

[0297] Exemplary Cas mutants are described in International PCT Publication No. WO 2015/161276 and Konermann et al., Cell 173 (2018), 665-676 which are incorporated herein by reference in their entireties.

3. gRNAs

[0298] The present disclosure provides guide RNAs (gRNAs) that direct a site-directed modifying polypeptide to a specific target nucleic acid sequence. A gRNA comprises a nucleic acid-targeting segment and protein-binding segment. The nucleic acid-targeting segment of a gRNA comprises a nucleotide sequence that is complementary to a sequence in the target nucleic acid sequence. As such, the nucleic acid-targeting segment of a gRNA interacts with a target nucleic acid in a sequence-specific manner via hybridization (i.e., base pairing), and the nucleotide sequence of the nucleic acid-targeting segment determines the location within the target nucleic acid that the gRNA will bind. The nucleic acid-targeting segment of a gRNA can be modified (e.g., by genetic engineering) to hybridize to any desired sequence within a target nucleic acid sequence.

[0299] The protein-binding segment of a guide RNA interacts with a site-directed modifying polypeptide (e.g. a Cas protein) to form a complex. The guide RNA guides the bound polypeptide to a specific nucleotide sequence within target nucleic acid via the above-described nucleic acid-targeting segment. The protein-binding segment of a guide RNA comprises two stretches of nucleotides that are complementary to one another and which form a double stranded RNA duplex.

[0300] In some embodiments, a gRNA comprises two separate RNA molecules. In such embodiments, each of the two RNA molecules comprises a stretch of nucleotides that are complementary to one another such that the complementary nucleotides of the two RNA molecules hybridize to form the double-stranded RNA duplex of the protein-binding segment. In some embodiments, a gRNA comprises a single RNA molecule (sgRNA).

[0301] The specificity of a gRNA for a target locus is mediated by the sequence of the nucleic acid-binding segment, which comprises about 20 nucleotides that are complementary to a target nucleic acid sequence within the target locus. In some embodiments, the corresponding target nucleic acid sequence is approximately 20 nucleotides in length. In some embodiments, the nucleic acid-binding segments of the gRNA sequences of the present disclosure are at least 90% complementary to a target nucleic acid sequence within a target locus. In some embodiments, the nucleic acid-binding segments of the gRNA sequences of the present disclosure are at least 95%, 96%, 97%, 98%, or 99% complementary to a target nucleic acid sequence within a target locus. In some embodiments, the nucleic acid-binding segments of the gRNA sequences of the present disclosure are 100% complementary to a target nucleic acid sequence within a target locus. In some embodiments, the target nucleic acid sequence is an RNA target sequence. In some embodiments, the target nucleic acid sequence is a DNA target sequence.

[0302] In some embodiments, the target nucleic acid sequence within the target locus must be changed. For example, changes in the target nucleic acid sequence may occur because the Cas protein being used is changed and the new Cas protein has a different PAM. The description provides many examples of target nucleic acid sequences for gRNAs in the specification and tables provided herein. Any of these target nucleic acid sequences can be changed by moving the target nucleic acid sequence 5′ or 3′ within the target locus within a given gene. In some embodiments, the target nucleic acid sequence is moved, at most, 100 bp 5′ or 3′ within the target locus within a given gene. In other embodiments, the target nucleic acid sequence is moved, at most, 1, 2, 3, 4, 5, 6, 7, 8, 9, 10, 11, 12, 13, 14, 15, 16, 17, 18, 19 20, 21, 22, 23, 24, 25, 30, 35, 40, 45, 50, 55, 60, 65, 70, 75, 80, 85, 90 or 95 bp 5′ or 3′ within the target locus within a given gene.

[0303] In some embodiments, the gene-regulating system comprises at least two gRNA molecules, wherein at least one gRNA molecule comprises a SOCS1-targeting nucleic acid-binding segment (i.e., a SOCS1-targeting gRNA). In some embodiments, the nucleic acid-binding segment of the at least one SOCS1-targeting gRNA molecules binds to a target DNA sequence that is at least 95%, 96%, 97%, 98%, or 99% identical to a DNA sequence encoded by the SOCS1 gene (SEQ ID NO: 1) or the Socs1 gene (SEQ ID NO: 2). In some embodiments, the nucleic acid-binding segment of the at least one SOCS1-targeting gRNA molecule binds to a target DNA sequence that is 100% identical to a DNA sequence encoded by the SOCS1 gene (SEQ ID NO: 1) or the Socs1 gene (SEQ ID NO: 2).

[0304] In some embodiments, the nucleic acid-binding segment of the at least one SOCS1-targeting gRNA molecules binds to a target DNA sequence that is at least 95%, 96%, 97%, 98%, or 99% identical to a DNA sequence defined by a set of genomic coordinates shown in Table 3 or Table 4. In some embodiments, the nucleic acid-binding segment of the at least one SOCS1-targeting gRNA molecules binds to a target DNA sequence that is 100% identical to a DNA sequence defined by a set of genomic coordinates shown in Table 3 or Table 4. In some embodiments, the nucleic acid-binding segment of the at least one SOCS1-targeting gRNA molecules binds to a target DNA sequence that is at least 95%, 96%, 97%, 98%, or 99% identical to one of SEQ ID NOs: 7-151. In some embodiments, the nucleic acid-binding segment of the at least one SOCS1-targeting gRNA molecules binds to a target DNA sequence that is 100% identical to one of SEQ ID NOs: 7-151. Exemplary SOCS1 target DNA sequences are shown in Tables 12 and 13.

[0305] In some embodiments, the nucleic acid-binding segment of the at least one SOCS1-targeting gRNA molecules is encoded by a DNA sequence that is at least 95%, 96%, 97%, 98%, or 99% identical to one of SEQ ID NOs: 7-151. In some embodiments, the nucleic acid-binding segment of the at least one SOCS1-targeting gRNA molecules is encoded by a DNA sequence that is 100% identical to one of SEQ ID NOs: 7-151. Exemplary DNA sequences encoding the nucleic acid-binding segment of the SOCS1-targeting gRNAs are shown in Tables 12 and 13.

TABLE 12
Exemplary human SOCS1 gRNA sequences

| Target | Sequence | SEQ ID |
|---|---|---|
| hSOCS1_gRNA_1 | GCGGCTGCGCGCCGAGCCCG | 20 |
| hSOCS1_gRNA_2 | GGACGCCTGCGGATTCTACT | 21 |
| hSOCS1_gRNA_3 | GGCTGCCATCCAGGTGAAAG | 22 |
| hSOCS1_gRNA_4 | GCGGCTGTCGCGCACCAGGA | 23 |
| hSOCS1_gRNA_5 | TGGACGCCTGCGGATTCTAC | 24 |
| hSOCS1_gRNA_6 | GACGCCTGCGGATTCTACTG | 25 |
| hSOCS1_gRNA_7 | AGTGCTCCAGCAGCTCGAAG | 26 |
| hSOCS1_gRNA_8 | GCCGGCCGCTTTCACCTGGA | 27 |
| hSOCS1_gRNA_9 | AGTAGAATCCGCAGGCGTCC | 28 |
| hSOCS1_gRNA_10 | CGCACCAGGAAGGTGCCCAC | 29 |
| hSOCS1_gRNA_11 | GGCCGGCCTGAAAGTGCACG | 30 |
| hSOCS1_gRNA_12 | TCCGTTCGCACGCCGATTAC | 31 |
| hSOCS1_gRNA_13 | AGCGCGCTCCTGGACGCCTG | 32 |
| hSOCS1_gRNA_14 | CGGCTGCGCGCCGAGCCCGT | 33 |
| hSOCS1_gRNA_15 | ACGCCTGCGGATTCTACTGG | 34 |
| hSOCS1_gRNA_16 | CGAGGCCATCTTCACGCTAA | 35 |
| hSOCS1_gRNA_17 | TCAGGCCGGCCGCTTTCACC | 36 |
| hSOCS1_gRNA_18 | CTTAGCGTGAAGATGGCCTC | 37 |
| hSOCS1_gRNA_19 | GCCGGTAATCGGCGTGCGAA | 38 |
| hSOCS1_gRNA_20 | CTGCATTGTCGGCTGCCACC | 39 |
| hSOCS1_gRNA_21 | GTGCGCCCCGTGCACGCTCA | 40 |
| hSOCS1_gRNA_22 | GCTGTGCCGCCAGCGCATCG | 41 |
| hSOCS1_gRNA_23 | CACGCGGCGCTGGCGCAGCG | 42 |
| hSOCS1_gRNA_24 | GCTCCTGCAGCGGCCGCACG | 43 |
| hSOCS1_gRNA_25 | AGCTCTCGCGGCTGCCATCC | 44 |
| hSOCS1_gRNA_26 | TGGTGCGCGACAGCCGCCAG | 45 |
| hSOCS1_gRNA_27 | GATGGTAGCACACAACCAGG | 46 |
| hSOCS1_gRNA_28 | AGAGGCAGTCGAAGCTCTCG | 47 |
| hSOCS1_gRNA_29 | GCTGGCGGCTGTCGCGCACC | 48 |
| hSOCS1_gRNA_30 | CCGAGGCCATCTTCACGCTA | 49 |
| hSOCS1_gRNA_31 | GGGGCCCCCAGCATGCGGCG | 50 |
| hSOCS1_gRNA_32 | GCTGCTGGAGCACTACGTGG | 51 |
| hSOCS1_gRNA_33 | CGAGCTGCTGGAGCACTACG | 52 |
| hSOCS1_gRNA_34 | CGAAAAAGCAGTTCCGCTGG | 53 |
| hSOCS1_gRNA_35 | GCAGGCGTCCAGGAGCGCGC | 54 |
| hSOCS1_gRNA_36 | GGGGCCCCTGAGCGTGCACG | 55 |
| hSOCS1_gRNA_37 | GCGGCGCCGCGCCGCATGCT | 56 |
| hSOCS1_gRNA_38 | GCACGCGGCGCTGGCGCAGC | 57 |
| hSOCS1_gRNA_39 | TGGGGGCCCCTGAGCGTGCA | 58 |
| hSOCS1_gRNA_40 | CAGGAAGGTGCCCACGGGCT | 59 |
| hSOCS1_gRNA_41 | TGCGCCCCGTGCACGCTCAG | 60 |
| hSOCS1_gRNA_42 | GCCATCCAGGTGAAAGCGGC | 61 |
| hSOCS1_gRNA_43 | CACGCGCGCCAGCGCGCTCC | 62 |
| hSOCS1_gRNA_44 | GGGCCCCCAGTAGAATCCGC | 63 |
| hSOCS1_gRNA_45 | ATCCGCGTGCACTTTCAGGC | 64 |
| hSOCS1_gRNA_46 | CGAGCCCGTGGGCACCTTCC | 65 |
| hSOCS1_gRNA_47 | CCACAGCAGCAGAGCCCCGA | 66 |
| hSOCS1_gRNA_48 | AGCCAGGTTCTCGCGGCCCA | 67 |
| hSOCS1_gRNA_49 | AAAGTGCACGCGGATGCTCG | 68 |
| hSOCS1_gRNA_50 | CTCTTCCTCCTCCTCGCCCG | 69 |
| hSOCS1_gRNA_51 | GCGTGCACGGGGCGCACGAG | 70 |
| hSOCS1_gRNA_52 | AAGTGCACGCGGATGCTCGT | 71 |
| hSOCS1_gRNA_53 | CGTGCGCCCCGTGCACGCTC | 72 |
| hSOCS1_gRNA_54 | GCAGCGGCCGCACGCGGCGC | 73 |
| hSOCSi gRNA_55 | CCTTAGCGTGAAGATGGCCT | 74 |
| hSOCS1_gRNA_56 | CAGGTTCTCGCGGCCCACGG | 75 |
| hSOCS1_gRNA_57 | GCGCACCAGGAAGGTGCCCA | 76 |
| hSOCS1_gRNA_58 | GCTGCCGGTCAAATCTGGAA | 77 |
| hSOCS1_gRNA_59 | CGGCGTGCGAACGGAATGTG | 78 |
| hSOCS1_gRNA_60 | CAGCAGCAGAGCCCCGACGG | 79 |
| hSOCS1_gRNA_61 | GGGCGAAAAAGCAGTTCCGC | 80 |
| hSOCS1_gRNA_62 | CGCACGCGGCGCTGGCGCAG | 81 |
| hSOCS1_gRNA_63 | GGATGCGAGCCAGGTTCTCG | 82 |
| hSOCS1_gRNA_64 | TGGCGGCACAGCTCCTGCAG | 83 |
| hSOCS1_gRNA_65 | GCGCCCGCGGCCGTGCCCCG | 84 |
| hSOCS1_gRNA_66 | GGCGCCGCGCCGCATGCTGG | 85 |
| hSOCS1_gRNA_67 | CGGTGGCCACGATGCGCTGG | 86 |
| hSOCS1_gRNA_68 | TGCTGTGGAGACTGCATTGT | 87 |
| hSOCS1_gRNA_69 | TAGGATGGTAGCACACAACC | 88 |
| hSOCS1_gRNA_70 | GCGGCCGTGCCCCGCGGTCC | 89 |
| hSOCS1_gRNA_71 | GAGCATCCGCGTGCACTTTC | 90 |
| hSOCS1_gRNA_72 | CGCTGCCGGTCAAATCTGGA | 91 |
| hSOCS1_gRNA_73 | CAGCGCATCGTGGCCACCGT | 92 |
| hSOCS1_gRNA_74 | GCGGATGCTCGTGGGTCCCG | 93 |
| hSOCS1_gRNA_75 | CGGCGCCGCGCCGCATGCTG | 94 |
| hSOCS1_gRNA_76 | CGGTCAAATCTGGAAGGGGA | 95 |
| hSOCS1_gRNA_77 | AGGAAGGTTCTGGCCGCCGT | 96 |
| hSOCS1_gRNA_78 | CCACGGTGGCCACGATGCGC | 97 |
| hSOCS1_gRNA_79 | CGCTGCGCCAGCGCCGCGTG | 98 |
| hSOCS1_gRNA_80 | AGGAGCTCAGGTAGTCGCGG | 99 |
| hSOCS1_gRNA_81 | GCAGCGGGGCCCCCAGCATG | 100 |
| hSOCS1_gRNA_82 | GGAAGGAGCTCAGGTAGTCG | 101 |
| hSOCS1_gRNA_83 | TCGCGGAGGACGGGGTTGAG | 102 |
| hSOCS1_gRNA_84 | CGACTGCCTCTTCGAGCTGC | 103 |
| hSOCS1_gRNA_85 | GCGCCGCGTGCGGCCGCTGC | 104 |
| hSOCS1_gRNA_86 | CACCGTGGGCCGCGAGAACC | 105 |
| hSOCS1_gRNA_87 | GTGCCCCGCGGTCCCGGCCC | 106 |
| hSOCS1_gRNA_88 | CTGCCGGTCAAATCTGGAAG | 107 |
| hSOCS1_gRNA_89 | CTTCCCCTTCCAGATTTGAC | 108 |
| hSOCS1_gRNA_90 | CTCAGGTAGTCGCGGAGGAC | 109 |
| hSOCS1_gRNA_91 | CGGGCGCTGCCGGTCAAATC | 110 |
| hSOCS1_gRNA_92 | GGAAGGTTCTGGCCGCCGTC | 111 |
| hSOCS1_gRNA_93 | GCTCAGGTAGTCGCGGAGGA | 112 |
| hSOCS1_gRNA_94 | GCGGAAGTGCGTGTCGCCGG | 113 |
| hSOCS1_gRNA_95 | GGACCGCGGGGCACGGCCGC | 114 |
| hSOCS1_gRNA_96 | GGGACCGCGGGGCACGGCCG | 115 |
| hSOCS1_gRNA_97 | GCGCGTGATGCGCCGGTAAT | 116 |
| hSOCS1_gRNA_98 | TCAGGTAGTCGCGGAGGACG | 117 |
| hSOCS1_gRNA_99 | TGCGGAAGTGCGTGTCGCCG | 118 |
| hSOCS1_gRNA_100 | GGGGCCGGGACCGCGGGGCA | 119 |
| hSOCS1_gRNA_101 | CCGTCGGGGCTCTGCTGCTG | 120 |
| hSOCS1_gRNA_102 | GAAGGTTCTGGCCGCCGTCG | 121 |
| hSOCS1_gRNA_103 | GTGTGCTACCATCCTACAGA | 122 |
| hSOCS1_gRNA_104 | GTCGCGGAGGACGGGGTTGA | 123 |
| hSOCS1_gRNA_105 | CGCTGGCGCGCGTGATGCGC | 124 |
| hSOCS1_gRNA_106 | GCGTGCACGGCGGGCGCTGC | 125 |
| hSOCS1_gRNA_107 | TCTGGAAGGGGAAGGAGCTC | 126 |
| hSOCS1_gRNA_108 | GTGCGTGTCGCCGGGGGCCG | 127 |
| hSOCS1_gRNA_109 | GGGCACGGCCGCGGGCGCGC | 128 |
| hSOCS1_gRNA_110 | GTTAATGCTGCGTGCACGGC | 129 |
| hSOCS1_gRNA_111 | GCACGGCCGCGGGCGCGCGG | 130 |
| hSOCS1_gRNA_112 | GGGGCACGGCCGCGGGCGCG | 131 |
| hSOCS1_gRNA_113 | GTGCGGAAGTGCGTGTCGCC | 132 |
| hSOCS1_gRNA_114 | GAGGAAGAGGAGGAAGGTTC | 133 |
| hSOCS1_gRNA_115 | GGCTGGCCCCTTCTGTAGGA | 134 |
| hSOCS1_gRNA_116 | GGGGCCGGGGCCGGGACCGC | 135 |
| hSOCS1_gRNA_117 | CGCGGAGGACGGGGTTGAGG | 136 |
| hSOCS1_gRNA_118 | TTTCGCCCTTAGCGTGAAGA | 137 |
| hSOCS1_gRNA_119 | GGCACGGCCGCGGGCGCGCG | 138 |
| hSOCS1_gRNA_120 | AGTCGCGGAGGACGGGGTTG | 139 |
| hSOCS1_gRNA_121 | GGGCCGGGGCCGGGACCGCG | 140 |
| hSOCS1_gRNA_122 | AAGTGCGTGTCGCCGGGGGC | 141 |
| hSOCS1_gRNA_123 | CTCCGGCTGGCCCCTTCTGT | 142 |
| hSOCS1_gRNA_124 | GGCGGCGCCGCGCCGCATGC | 143 |
| hSOCS1_gRNA_125 | AGTGCGTGTCGCCGGGGGCC | 144 |
| hSOCS1_gRNA_126 | TGTGCGGAAGTGCGTGTCGC | 145 |
| hSOCS1_gRNA_127 | GTGTCGCCGGGGGCCGGGGC | 146 |
| hSOCS1_gRNA_128 | TGTCGCCGGGGGCCGGGGCC | 147 |
| hSOCS1_gRNA_129 | GCGGTCCCGGCCCCGGCCCC | 148 |
| hSOCS1_gRNA_130 | CGCGGGGGCCGCGGGCGAGG | 149 |
| hSOCS1_gRNA_131 | CGCGGGCGAGGAGGAGGAAG | 150 |
| hSOCS1_gRNA_132 | GGGCGAGGAGGAGGAAGAGG | 151 |

TABLE 13
Exemplary murine Socs1_gRNA sequences

| Target | Sequence | SEQ ID |
|---|---|---|
| mSocs1_gRNA_1 | GAAGTGCACGCGGATGCTCG | 7 |
| mSocs1_gRNA_2 | AGTGCTCCAGCAGCTCGAAA | 8 |
| mSocs1_gRNA_3 | GCCGGCCGCTTCCACTTGGA | 9 |
| mSocs1_gRNA_4 | GCTGTGTCGCCAGCGCATCG | 10 |
| mSocs1_gRNA_5 | GCGACTGTCGCGCACCAAGA | 11 |
| mSocs1_gRNA_6 | GCGTGCACGGGGCGCACGAG | 12 |
| mSocs1_gRNA_7 | TCACGGAGTACCGGGTTAAG | 13 |
| mSocs1_gRNA_8 | GGACGCCTGCGGCTTCTATT | 14 |
| mSocs1_gRNA_9 | GCGCGAAGAAGCAGTTCCGT | 15 |
| mSocs1_gRNA_10 | GCTCAGCGTGAAGATGGCTT | 16 |
| mSocs1_gRNA_11 | CGAGCCCGTGGGCACCTTCT | 17 |
| mSocs1_gRNA_12 | ATCCGCGTGCACTTCCAGGC | 18 |
| mSocs1_gRNA_13 | CGCCAGGTTCTCGCGACCCA | 19 |

[0306] In some embodiments, the gene-regulating system comprises at least two gRNA molecules, wherein at least one gRNA molecule comprises a PTPN2-targeting nucleic acid-binding segment (i.e., a PTPN2-targeting gRNA). In some embodiments, the nucleic acid-binding segment of the at least one PTPN2-targeting gRNA molecules binds to a target DNA sequence that is at least 95%, 96%, 97%, 98%, or 99% identical to a DNA sequence encoded by the PTPN2 gene (SEQ ID NO: 3) or the Ptpn2 gene (SEQ ID NO: 4). In some embodiments, the nucleic acid-binding segment of the at least one PTPN2-targeting gRNA molecules binds to a target DNA sequence that is 100% identical to a DNA sequence encoded by the PTPN2 gene (SEQ ID NO: 3) or the Ptpn2 gene (SEQ ID NO: 4).

[0307] In some embodiments, the nucleic acid-binding segment of the at least one PTPN2-targeting gRNA molecules binds to a target DNA sequence that is at least 95%, 96%, 97%, 98%, or 99% identical to a DNA sequence defined by a set of genomic coordinates shown in Table 5 or Table 6. In some embodiments, the nucleic acid-binding segment of the at least one PTPN2-targeting gRNA molecules binds to a target DNA sequence that is 100% identical to a DNA sequence defined by a set of genomic coordinates shown in Table 5 or Table 6. In some embodiments, the nucleic acid-binding segment of the at least one PTPN2-targeting gRNA molecules binds to a target DNA sequence that is at least 95%, 96%, 97%, 98%, or 99% identical to one of SEQ ID NOs: 185-207. In some embodiments, the nucleic acid-binding segment of the at least one PTPN2-targeting gRNA molecules binds to a target DNA sequence that is 100% identical to one of SEQ ID NOs: 185-207. Exemplary PTPN2 target DNA sequences are shown in Tables 14 and 15.

[0308] In some embodiments, the nucleic acid-binding segment of the at least one PTPN2-targeting gRNA molecules is encoded by a DNA sequence that is at least 95%, 96%, 97%, 98%, or 99% identical to one of SEQ ID NOs: 185-207. In some embodiments, the nucleic acid-binding segment of the at least one PTPN2-targeting gRNA molecules is encoded by a DNA sequence that is 100% identical to one of SEQ ID NOs: 185-207. In some embodiments, the nucleic acid-binding segment of the at least one PTPN2-targeting gRNA molecules is encoded by a DNA sequence that is at least 95%, 96%, 97%, 98%, or 99% identical to one of SEQ ID NOs: 272-375. In some embodiments, the nucleic acid-binding segment of the at least one PTPN2-targeting gRNA molecules is encoded by a DNA sequence that is 100% identical to one of SEQ ID NOs: 272-375. In some embodiments, the nucleic acid-binding segment of the at least one PTPN2-targeting gRNA molecules is encoded by a DNA sequence that is at least 95%, 96%, 97%, 98%, or 99% identical to one of SEQ ID NOs: 272-308. In some embodiments, the nucleic acid-binding segment of the at least one PTPN2-targeting gRNA molecules is encoded by a DNA sequence that is 100% identical to one of SEQ ID NOs: 272-308. Exemplary DNA sequences encoding the nucleic acid-binding segment of the PTPN2-targeting gRNAs are shown in Tables 14 and 15.

TABLE 14
Exemplary human PTPN2 gRNA sequences

| Target | Sequence | SEQ ID |
|---|---|---|
| hPTPN2_gRNA_1 | CCATGCCCACCACCATCGAG | 185 |
| hPTPN2_gRNA_2 | TCTACGGAAACGTATTCGAG | 186 |
| hPTPN2_gRNA_3 | TTTAGTATATTGAGAACTTG | 187 |
| hPTPN2_gRNA_4 | GCACTACAGTGGATCACCGC | 188 |
| hPTPN2_gRNA_5 | TGTCATGCTGAACCGCATTG | 189 |
| hPTPN2_gRNA_6 | GGAAACTTGGCCACTCTATG | 190 |
| hPTPN2_gRNA_7 | GTATTTGAAATTATTAATGC | 191 |
| hPTPN2_gRNA_8 | CAGTTTAGTTGACATAGAAG | 192 |
| hPTPN2_gRNA_9 | GGGTCTGAATAAGACCCATT | 193 |
| hPTPN2_gRNA_10 | CCATGACTATCCTCATAGAG | 194 |
| hPTPN2_gRNA_11 | CCATGACTATCCTCATAGAG | 272 |
| hPTPN2_gRNA_12 | CTCTTCGAACTCCCGCTCGA | 273 |
| hPTPN2_gRNA_13 | GAACCCTGACCATGGGCCTG | 274 |
| hPTPN2_gRNA_14 | GCTCCTTGAACCCTGACCAT | 275 |
| hPTPN2_gRNA_15 | AGTTGGATACTCAGCGTCGC | 276 |
| hPTPN2_gRNA_16 | CCGCTCGATGGTGGTGGGCA | 277 |
| hPTPN2_gRNA_17 | CAGAAATGGCAGCATGTGTT | 278 |
| hPTPN2_gRNA_18 | GCACTACAGTGGATCACCGC | 279 |
| hPTPN2_gRNA_19 | GGTAGACACTTGTCTTGTTT | 280 |
| hPTPN2_gRNA_20 | TGGCAGCATGTGTTAGGAAG | 281 |
| hPTPN2_gRNA_21 | AGGCCCATGGTCAGGGTTCA | 282 |
| hPTPN2_gRNA_22 | GTTCAGCATGACAACTGCTT | 283 |
| hPTPN2_gRNA_23 | CAATGGAGGAGAACAGTGAG | 284 |
| hPTPN2_gRNA_24 | CTCTTCTATGTCAACTAAAC | 285 |
| hPTPN2_gRNA_25 | AGTGGATCACCGCAGGCCCA | 286 |
| hPTPN2_gRNA_26 | CTGACAGGTGACCGATGTAC | 287 |
| hPTPN2_gRNA_27 | AACTCCCGCTCGATGGTGGT | 288 |
| hPTPN2_gRNA_28 | GTCTCCCTGATCCATCCAGT | 289 |
| hPTPN2_gRNA_29 | TAGAGGAAAGTCCTGTACAT | 290 |
| hPTPN2_gRNA_30 | ATGTATGGAAAGGATGGTAA | 291 |
| hPTPN2_gRNA_31 | GCCCAATGCCTGCACTACAG | 292 |
| hPTPN2_gRNA_32 | CGAGCGGGAGTTCGAAGAGT | 293 |
| hPTPN2_gRNA_33 | TCACCGCAGGCCCATGGTCA | 294 |
| hPTPN2_gRNA_34 | CAGTTTAGTTGACATAGAAG | 295 |
| hPTPN2_gRNA_35 | CCATGCCCACCACCATCGAG | 296 |
| hPTPN2_gRNA_36 | GCCAAACCATAAGCCAGAAA | 297 |
| hPTPN2_gRNA_37 | CCGATTCTTTCTCCACAATG | 298 |
| hPTPN2_gRNA_38 | TTCGAACTCCCGCTCGATGG | 299 |
| hPTPN2_gRNA_39 | AGTGCAGGCATTGGGCGCTC | 300 |
| hPTPN2_gRNA_40 | GGAAACTTGGCCACTCTATG | 301 |
| hPTPN2_gRNA_41 | ATCCACTGTAGTGCAGGCAT | 302 |
| hPTPN2_gRNA_42 | CACTCTATGAGGATAGTCAT | 303 |
| hPTPN2_gRNA_43 | CCACTCTATGAGGATAGTCA | 304 |
| hPTPN2_gRNA_44 | TCCACTGTAGTGCAGGCATT | 305 |
| hPTPN2_gRNA_45 | AAGTTCTTTCCATCGTTTCT | 306 |
| hPTPN2_gRNA_46 | TCGCTGGCAGCCGCTGTACT | 307 |
| hPTPN2_gRNA_47 | GAACTCCCGCTCGATGGTGG | 308 |
| hPTPN2_gRNA_48 | AGGATGGTAAAGGCACCAAC | 309 |
| hPTPN2_gRNA_49 | AAAGGGAGATTCTAGTATAC | 310 |
| hPTPN2_gRNA_50 | AGAATTTAGGATGTATGGAA | 311 |
| hPTPN2_gRNA_51 | GGGTCTGAATAAGACCCATT | 312 |
| hPTPN2_gRNA_52 | GGCACCAACTGGATGGATCA | 313 |
| hPTPN2_gRNA_53 | CTCTAAAATGCAAGATACAA | 314 |
| hPTPN2_gRNA_54 | GTATTTGAAATTATTAATGC | 315 |
| hPTPN2_gRNA_55 | CCTTTCTTGCAGATGGAAAA | 316 |
| hPTPN2_gRNA_56 | CTGCACCTTCTGAGCTGTGG | 317 |
| hPTPN2_gRNA_57 | ATGCTGCCATTTCTGGCTTA | 318 |
| hPTPN2_gRNA_58 | TTTCTTTAAACAGCATCTCT | 319 |
| hPTPN2_gRNA_59 | AGACATGGAATGCAGAATGC | 320 |
| hPTPN2_gRNA_60 | AGGCACCAACTGGATGGATC | 321 |
| hPTPN2_gRNA_61 | TAATGACTGAAAAATACAAT | 322 |
| hPTPN2_gRNA_62 | GAATGCAGAATGCAGGAAAT | 323 |
| hPTPN2_gRNA_63 | TTTAGGATGTATGGAAAGGA | 324 |
| hPTPN2_gRNA_64 | CTAACACATGCTGCCATTTC | 325 |
| hPTPN2_gRNA_65 | TCATACATGGCTATAATAGA | 326 |
| hPTPN2_gRNA_66 | ACGATGGAAAGAACTTTCTA | 327 |
| hPTPN2_gRNA_67 | ACGTATTCGAGAGGACAGAA | 328 |
| hPTPN2_gRNA_68 | GCGGTGATCCACTGTAGTGC | 329 |
| hPTPN2_gRNA_69 | TATTAATGCTGGATGTTAAA | 330 |
| hPTPN2_gRNA_70 | GAGATGCTGTTTAAAGAAAC | 331 |
| hPTPN2_gRNA_71 | CAGCAAGAATTTAGGATGTA | 332 |
| hPTPN2_gRNA_72 | TTGACATAGAAGAGGCACAA | 333 |
| hPTPN2_gRNA_73 | GATTCAGGGACTCCAAAATC | 334 |
| hPTPN2_gRNA_74 | CTCACTTTCATTATACTACC | 335 |
| hPTPN2_gRNA_75 | TTTAGTATATTGAGAACTTG | 336 |
| hPTPN2_gRNA_76 | AGGGACTCCAAAATCTGGCC | 337 |
| hPTPN2_gRNA_77 | AGGTTAAATGTGCACAGTAC | 338 |
| hPTPN2_gRNA_78 | ATCACCGCAGGCCCATGGTC | 339 |
| hPTPN2_gRNA_79 | AGCATCTCTTGGTCATCTGT | 340 |
| hPTPN2_gRNA_80 | GAAGGAGCAAAATGTATAAA | 341 |
| hPTPN2_gRNA_81 | GCCATTTCTGGCTTATGGTT | 342 |
| hPTPN2_gRNA_82 | CTGGATGGATCAGGGAGACA | 343 |
| hPTPN2_gRNA_83 | AAATACAATGGGAACAGAAT | 344 |
| hPTPN2_gRNA_84 | ATAATGACTGAAAAATACAA | 345 |
| hPTPN2_gRNA_85 | CATGCCCACCACCATCGAGC | 346 |
| hPTPN2_gRNA_86 | AACATGAGAAAATACCGAAT | 347 |
| hPTPN2_gRNA_87 | AGAAATGAAGCTGGTGATTC | 348 |
| hPTPN2_gRNA_88 | CCGCATTGTGGAGAAAGAAT | 349 |
| hPTPN2_gRNA_89 | GAAATGAAGCTGGTGATTCA | 350 |
| hPTPN2_gRNA_90 | TTGTTTAAAGTGAGAGAATC | 351 |
| hPTPN2_gRNA_91 | CCGCGACTCACCAAGTACAG | 352 |
| hPTPN2_gRNA_92 | GAACATGAGAAAATACCGAA | 353 |
| hPTPN2_gRNA_93 | TATACTACCTGGCCAGATTT | 354 |
| hPTPN2_gRNA_94 | TATGAGAATCTCAGTTGATC | 355 |
| hPTPN2_gRNA_95 | TCAACTGAGATTCTCATACA | 356 |
| hPTPN2_gRNA_96 | TGAGAATCTCAGTTGATCTG | 357 |
| hPTPN2_gRNA_97 | ATGAGAATCTCAGTTGATCT | 358 |
| hPTPN2_gRNA_98 | TGGTAAAGGCACCAACTGGA | 359 |
| hPTPN2_gRNA_99 | TGTCATGCTGAACCGCATTG | 360 |
| hPTPN2_gRNA_100 | TTTGGTGAATGATCAAAGGC | 361 |
| hPTPN2_gRNA_101 | ATGAAAGTGAGATATTGTTC | 362 |
| hPTPN2_gRNA_102 | TATTTCCTCATAGTGCTCTA | 363 |
| hPTPN2_gRNA_103 | AGAAGGAGCAAAATGTATAA | 364 |
| hPTPN2_gRNA_104 | TTTGTTTGGTGAATGATCAA | 365 |
| hPTPN2_gRNA_105 | TCTACGGAAACGTATTCGAG | 366 |
| hPTPN2_gRNA_106 | AAAGGCCACCACAGCTCAGA | 367 |
| hPTPN2_gRNA_107 | AGGTGCAGCAGATGAAACAG | 368 |
| hPTPN2_gRNA_108 | GGCTCCTTGAACCCTGACCA | 369 |
| hPTPN2_gRNA_109 | AAGGAGTTACATCTTAACAC | 370 |
| hPTPN2_gRNA_110 | TAAAATGCAAGATACAATGG | 371 |
| hPTPN2_gRNA_111 | ACAAGTGTCTACCAGAGAGA | 372 |
| hPTPN2_gRNA_112 | GCGCTCTGGCACCTTCTCTC | 373 |
| hPTPN2_gRNA_113 | CTGCTGCACCTTCTGAGCTG | 374 |
| hPTPN2_gRNA_114 | TCTTCCCTACCTAGAAACGA | 375 |

TABLE 15
Exemplary murine Ptpn2 gRNA sequences

| Target | Sequence | SEQ ID |
|---|---|---|
| mPTPN2_gRNA_1 | AATCTGGCCAGGTGGTATAA | 195 |
| mPTPN2_gRNA_2 | AATATGAGAAAGTATCGAAT | 196 |
| mPTPN2_gRNA_3 | ATCACTGCAGGTCCATGGTC | 197 |
| mPTPN2_gRNA_4 | ATGTGCACAGTACTGGCCAA | 198 |
| mPTPN2_gRNA_5 | GGCAGCATGTGTTCGGAAGT | 199 |
| mPTPN2_gRNA_6 | AAGAAGTTTAGAAATGAAGC | 200 |
| mPTPN2_gRNA_7 | GCCACACCATGAGCCAGAAA | 201 |
| mPTPN2_gRNA_8 | CCTTTCTTGCAGATGGAAAA | 202 |
| mPTPN2_gRNA_9 | GTACTTTGCTCCTTCTATTA | 203 |
| mPTPN2_gRNA_10 | AGAAATGAAGCTGGTGACTC | 204 |
| mPTPN2_gRNA_11 | GTTTAGCATGACAACTGCTT | 205 |
| mPTPN2_gRNA_12 | GCCCGATGCCCGCACTGCAA | 206 |
| mPTPN2_gRNA_13 | TGACAGAGAAATGGTGTTTA | 207 |

[0309] In some embodiments, the gene-regulating system comprises at least two gRNA molecules, wherein at least one gRNA molecule comprises a ZC3H12A-targeting nucleic acid-binding segment (i.e., a ZC3H12A-targeting gRNA). In some embodiments, the nucleic acid-binding segment of the at least one ZC3H12A-targeting gRNA molecules binds to a target DNA sequence that is at least 95%, 96%, 97%, 98%, or 99% identical to a DNA sequence encoded by the ZC3H12A gene (SEQ ID NO: 5) or the Zc3h12a gene (SEQ ID NO: 6). In some embodiments, the nucleic acid-binding segment of the at least one ZC3H12A-targeting gRNA molecules binds to a target DNA sequence that is 100% identical to a DNA sequence encoded by the ZC3H12A gene (SEQ ID NO: 5) or the Zc3h12a gene (SEQ ID NO: 6).

[0310] In some embodiments, the nucleic acid-binding segment of the at least one ZC3H12A-targeting gRNA molecules binds to a target DNA sequence that is at least 95%, 96%, 97%, 98%, or 99% identical to a DNA sequence defined by a set of genomic coordinates shown in Table 7 or Table 8. In some embodiments, the nucleic acid-binding segment of the at least one ZC3H12A-targeting gRNA molecules binds to a target DNA sequence that is 100% identical to a DNA sequence defined by a set of genomic coordinates shown in Table 7 or Table 8. In some embodiments, the nucleic acid-binding segment of the at least one ZC3H12A-targeting gRNA molecules binds to a target DNA sequence that is at least 95%, 96%, 97%, 98%, or 99% identical to one of SEQ ID NOs: 208-230. In some embodiments, the nucleic acid-binding segment of the at least one ZC3H12A-targeting gRNA molecules binds to a target DNA sequence that is 100% identical to one of SEQ ID NOs: 208-230. Exemplary ZC3H12A target DNA sequences are shown in Tables 16 and 17.

[0311] In some embodiments, the nucleic acid-binding segment of the at least one ZC3H12A-targeting gRNA molecules is encoded by a DNA sequence that is at least 95%, 96%, 97%, 98%, or 99% identical to one of SEQ ID NOs: 208-230. In some embodiments, the nucleic acid-binding segment of the at least one ZC3H12A-targeting gRNA molecules is encoded by a DNA sequence that is 100% identical to one of SEQ ID NOs: 208-230. In some embodiments, the nucleic acid-binding segment of the at least one ZC3H12A-targeting gRNA molecules is encoded by a DNA sequence that is at least 95%, 96%, 97%, 98%, or 99% identical to one of SEQ ID NOs: 376-812. In some embodiments, the nucleic acid-binding segment of the at least one ZC3H12A-targeting gRNA molecules is encoded by a DNA sequence that is 100% identical to one of SEQ ID NOs: 376-812. In some embodiments, the nucleic acid-binding segment of the at least one ZC3H12A-targeting gRNA molecules is encoded by a DNA sequence that is at least 95%, 96%, 97%, 98%, or 99% identical to one of SEQ ID NOs: 376-575. In some embodiments, the nucleic acid-binding segment of the at least one ZC3H12A-targeting gRNA molecules is encoded by a DNA sequence that is 100% identical to one of SEQ ID NOs: 376-575. Exemplary DNA sequences encoding the nucleic acid-binding segment of the ZC3H12A-targeting gRNAs are shown in Tables 16 and 17.

TABLE 16
Exemplary human ZC3H12A gRNA sequences

| Target | Sequence | SEQ ID |
|---|---|---|
| hZC3H12A_gRNA_1 | AAGCTGGCCTACGAGTCTGA | 216 |
| hZC3H12A_gRNA_2 | GCGGGACTAGAGGGAGCTGA | 217 |
| hZC3H12A_gRNA_3 | CAGCTCCCTCTAGTCCCGCG | 218 |
| hZC3H12A_gRNA_4 | CAGGACGCTGTGGATCTCCG | 219 |
| hZC3H12A_gRNA_5 | AACATACTTGTCATTGACGA | 220 |
| hZC3H12A_gRNA_6 | CTCACCTGTGATGGGCACGT | 221 |
| hZC3H12A_gRNA_7 | AACACGGGACAGCCACCGAG | 222 |
| hZC3H12A_gRNA_8 | CGACAGATTCATTGTGAAGC | 223 |
| hZC3H12A_gRNA_9 | ACACCATCACGACGCGTGGG | 224 |
| hZC3H12A_gRNA_10 | TCCCAGCCATGGGAACAAGG | 225 |
| hZC3H12A_gRNA_11 | GGAGTGGAAGCGCTTCATCG | 226 |
| hZC3H12A_gRNA_12 | TTAGGGGTGCCACCACCCCG | 227 |
| hZC3H12A_gRNA_13 | GACACATACCGTGACCTCCA | 228 |
| hZC3H12A_gRNA_14 | CCGGCCCAGTGGGTCATCAG | 229 |
| hZC3H12A_gRNA_15 | CCTGGAACTGCAGATGAAGG | 230 |
| hZC3H12A_gRNA_16 | GTCCTCTCCCTCCCAGCCAT | 376 |
| hZC3H12A_gRNA_17 | TCCCCAGGGTCCCGCCAAGA | 377 |
| hZC3H12A_gRNA_18 | AGTGAGCAGTGCAGCCTGGA | 378 |
| hZC3H12A_gRNA_19 | TGTCCTCTCCCTCCCAGCCA | 379 |
| hZC3H12A_gRNA_20 | CTGGACTGGGATGAAGGTGA | 380 |
| hZC3H12A_gRNA_21 | GGGGTGGGCCCGGCTCACCA | 381 |
| hZC3H12A_gRNA_22 | CACCACCCCGCGGGACTAGA | 382 |
| hZC3H12A_gRNA_23 | CTGCTGCCACTGCCCCCGCT | 383 |
| hZC3H12A_gRNA_24 | CGGCCCGACGTGCCCATCAC | 384 |
| hZC3H12A_gRNA_25 | CACTGCCCCCGCTAGGTGCG | 385 |
| hZC3H12A_gRNA_26 | ATACACGCTGGCCTGCTCCT | 386 |
| hZC3H12A_gRNA_27 | CAAACACTGTGATGTCTGTG | 387 |
| hZC3H12A_gRNA_28 | GCGGGACCCTGGGGATGCCT | 388 |
| hZC3H12A_gRNA_29 | GCGGGAGCGCCAGACCTCAC | 389 |
| hZC3H12A_gRNA_30 | AGGACAGGCTTCTCTCCACA | 390 |
| hZC3H12A_gRNA_31 | GCAGACACCAACACGGTGCT | 391 |
| hZC3H12A_gRNA_32 | CCACCACCCCGCGGGACTAG | 392 |
| hZC3H12A_gRNA_33 | ATCCCCAGGGTCCCGCCAAG | 393 |
| hZC3H12A_gRNA_34 | CCTGGAGGAAGGAGCAGCCT | 394 |
| hZC3H12A_gRNA_35 | AGAGCCAGATGTCGGAACTT | 395 |
| hZC3H12A_gRNA_36 | ATGACCCACTGGGCCGGCAC | 396 |
| hZC3H12A_gRNA_37 | GCAGCTTTGGGCCCACAGAC | 397 |
| hZC3H12A_gRNA_38 | ACTCTCTGTTAGCAGAGAGC | 398 |
| hZC3H12A_gRNA_39 | CCAGGAAGGAAATGCACCTA | 399 |
| hZC3H12A_gRNA_40 | AGGCACCACTCACCTGTGAT | 400 |
| hZC3H12A_gRNA_41 | CTGGGCCCGTGCCGGCCCAG | 401 |
| hZC3H12A_gRNA_42 | CAGCCAGCTGCTGGGGGTCC | 402 |
| hZC3H12A_gRNA_43 | TCCACTCCTGCCGCTCGCCT | 403 |
| hZC3H12A_gRNA_44 | CGTCCAGGCAGACACCAACA | 404 |
| hZC3H12A_gRNA_45 | CCCACCCACATCAGTCCTTC | 405 |
| hZC3H12A_gRNA_46 | GCCAGCTCTTGACCCGGCCT | 406 |
| hZC3H12A_gRNA_47 | CTGCCCTCCTTTTCCTCTTC | 407 |
| hZC3H12A_gRNA_48 | CCAGCCCCACCATGAGTCTG | 408 |
| hZC3H12A_gRNA_49 | GCCGATTCTTCCACCCAGAG | 409 |
| hZC3H12A_gRNA_50 | CTCCCAGAAGAGGAAAAGGA | 410 |
| hZC3H12A_gRNA_51 | GTGGGGCAGGGCAGGCAGCC | 411 |
| hZC3H12A_gRNA_52 | GGGTCAAGAGCTGGCCGCTG | 412 |
| hZC3H12A_gRNA_53 | ATGCCCCCTGATGACCCACT | 413 |
| hZC3H12A_gRNA_54 | AGCCTTCTCTGCCTTTGGCC | 414 |
| hZC3H12A_gRNA_55 | CTCTGCCTTTGGCCGGGCCA | 415 |
| hZC3H12A_gRNA_56 | GGAACCCAGCCTGCCCTCCC | 416 |
| hZC3H12A_gRNA_57 | GGCAGGAGCCTCGCACCTAG | 417 |
| hZC3H12A_gRNA_58 | TCCCAGACCAGCACATCCTG | 418 |
| hZC3H12A_gRNA_59 | GTGAGCAGTGCAGCCTGGAT | 419 |
| hZC3H12A_gRNA_60 | GAGCCAGATGTCGGAACTTT | 420 |
| hZC3H12A_gRNA_61 | GGCCGATGGCAAGCCTTGCT | 421 |
| hZC3H12A_gRNA_62 | AGGAGCCTCGCACCTAGCGG | 422 |
| hZC3H12A_gRNA_63 | AGGTCCCCAAGAGGAAAACA | 423 |
| hZC3H12A_gRNA_64 | CGCTGAGGAGGCCTCGGCCC | 424 |
| hZC3H12A_gRNA_65 | GAGGACAGCCACAGCCGTCA | 425 |
| hZC3H12A_gRNA_66 | CAGCCCCACCATGAGTCTGT | 426 |
| hZC3H12A_gRNA_67 | ACCCCCCAGAGCCCCAAGCA | 427 |
| hZC3H12A_gRNA_68 | GAGGCACCACTCACCTGTGA | 428 |
| hZC3H12A_gRNA_69 | CCAAGAGGAAAACAGGGCAC | 429 |
| hZC3H12A_gRNA_70 | GTACGTCTCCCAGGATTGCC | 430 |
| hZC3H12A_gRNA_71 | CACAGCCTCCACCAGGTGCG | 431 |
| hZC3H12A_gRNA_72 | GATCTCGGCAGCCAGCTGCT | 432 |
| hZC3H12A_gRNA_73 | CAGCCTTCTCTGCCTTTGGC | 433 |
| hZC3H12A_gRNA_74 | CAGAAGTGACACTTACCTCA | 434 |
| hZC3H12A_gRNA_75 | GCTGGCCGCTGAGGAGGCCT | 435 |
| hZC3H12A_gRNA_76 | CAGCTCCCTCTAGTCCCGCG | 436 |
| hZC3H12A_gRNA_77 | CGGGGTGGGCCCGGCTCACC | 437 |
| hZC3H12A_gRNA_78 | GACACATACCGTGACCTCCA | 438 |
| hZC3H12A_gRNA_79 | CAGGAAGGAAATGCACCTAT | 439 |
| hZC3H12A_gRNA_80 | AGTGGCCAGCACCCATGGCC | 440 |
| hZC3H12A_gRNA_81 | CTCTCCTATTCTTCCCAGCA | 441 |
| hZC3H12A_gRNA_82 | GCCCGAGTCCAGGCAATCCT | 442 |
| hZC3H12A_gRNA_83 | CACCTTCATCTGCAGTTCCA | 443 |
| hZC3H12A_gRNA_84 | GGCACAGGCAGACAGGTGAG | 444 |
| hZC3H12A_gRNA_85 | AGCACCCATGGCCCGGCCAA | 445 |
| hZC3H12A_gRNA_86 | CCACAGGCAGCTTACTCACT | 446 |
| hZC3H12A_gRNA_87 | TTCCTGTGCTCCAAAGTGAG | 447 |
| hZC3H12A_gRNA_88 | ACCGCAGCCTTCTCTGCCTT | 448 |
| hZC3H12A_gRNA_89 | GGGAGCCAATGCCCGAGTCC | 449 |
| hZC3H12A_gRNA_90 | TTCCCAGCAAGGCTTGCCAT | 450 |
| hZC3H12A_gRNA_91 | AGCCAGATGTCGGAACTTTG | 451 |
| hZC3H12A_gRNA_92 | TACACGGGCTACAGTCCCTA | 452 |
| hZC3H12A_gRNA_93 | TCTGTGTTAGACCCTCTTGG | 453 |
| hZC3H12A_gRNA_94 | AAGCTGCCCCCAGCGCTCTG | 454 |
| hZC3H12A_gRNA_95 | CTTTGGGGGGTTCGAGGAGG | 455 |
| hZC3H12A_gRNA_96 | GGGCCGATGGCAAGCCTTGC | 456 |
| hZC3H12A_gRNA_97 | CACAGGCAGCTTACTCACTG | 457 |
| hZC3H12A_gRNA_98 | CCCAGACCAGCACATCCTGC | 458 |
| hZC3H12A_gRNA_99 | AGGCTGGGTTCCATACCATA | 459 |
| hZC3H12A_gRNA_100 | GGACTTCTAATTGCTGAGAA | 460 |
| hZC3H12A_gRNA_101 | CTCAAATTCCCACAGACTCA | 461 |
| hZC3H12A_gRNA_102 | AAAACAGGGCACAGGCAGAC | 462 |
| hZC3H12A_gRNA_103 | CCAGATGTCGGAACTTTGGG | 463 |
| hZC3H12A_gRNA_104 | CTCCCTCTAGTCCCGCGGGG | 464 |
| hZC3H12A_gRNA_105 | AGCCCCCAGTGCAGAGCCCA | 465 |
| hZC3H12A_gRNA_106 | CCTGGACGCCCAGCTTCTGC | 466 |
| hZC3H12A_gRNA_107 | CAGGGGCTGGCAGGAGCCCG | 467 |
| hZC3H12A_gRNA_108 | CCTTGTTCCCATGGCTGGGA | 468 |
| hZC3H12A_gRNA_109 | CTCATCTGCCACAGAGCGCT | 469 |
| hZC3H12A_gRNA_110 | GGCAGACACCAACACGGTGC | 470 |
| hZC3H12A_gRNA_111 | TCCCTCTTGATTCCTCTTCC | 471 |
| hZC3H12A_gRNA_112 | CCCTCCCAGCCATGGGAACA | 472 |
| hZC3H12A_gRNA_113 | GCGTAAGAAGCCACTCACTT | 473 |
| hZC3H12A_gRNA_114 | TGTGTTTCCCCCGCACCTGG | 474 |
| hZC3H12A_gRNA_115 | CTGAGACCAGTGGTCATCGA | 475 |
| hZC3H12A_gRNA_116 | GGGCAGCGACCTGAGACCAG | 476 |
| hZC3H12A_gRNA_117 | AGCAATTAGAAGTCCCTGCA | 477 |
| hZC3H12A_gRNA_118 | TGGGTGAGCTGGTGAAACAC | 478 |
| hZC3H12A_gRNA_119 | CTGTTAGCAGAGAGCTGGAC | 479 |
| hZC3H12A_gRNA_120 | CCCCTGATGACCCACTGGGC | 480 |
| hZC3H12A_gRNA_121 | GTTCACACCATCACGACGCG | 481 |
| hZC3H12A_gRNA_122 | TGTCCAGGCTGGGCCCGTGC | 482 |
| hZC3H12A_gRNA_123 | ACACAGACCTATGCCCCATC | 483 |
| hZC3H12A_gRNA_124 | GGCTGCCTGCCCTGCCCCAC | 484 |
| hZC3H12A_gRNA_125 | CCATAGGTGCATTTCCTTCC | 485 |
| hZC3H12A_gRNA_126 | CAGGCTGGGTTCCATACCAT | 486 |
| hZC3H12A_gRNA_127 | GCCCCATCACAGCCTCCACC | 487 |
| hZC3H12A_gRNA_128 | TGCCCTCCTTTTCCTCTTCT | 488 |
| hZC3H12A_gRNA_129 | GCCAGATGTCGGAACTTTGG | 489 |
| hZC3H12A_gRNA_130 | CAGGCAGACAGGTGAGAGGA | 490 |
| hZC3H12A_gRNA_131 | CCAGGAGTCTGAGCTATGAG | 491 |
| hZC3H12A_gRNA_132 | GCTCCAGGTTGGGAGCCTTA | 492 |
| hZC3H12A_gRNA_133 | CTCACCTGTGATGGGCACGT | 493 |
| hZC3H12A_gRNA_134 | AGCTGGCCTACGAGTCTGAC | 494 |
| hZC3H12A_gRNA_135 | GTGGGTGGGGGCAGTGGGTA | 495 |
| hZC3H12A_gRNA_136 | CATCTGCAGTTCCAGGGCCG | 496 |
| hZC3H12A_gRNA_137 | GATGACCCACTGGGCCGGCA | 497 |
| hZC3H12A_gRNA_138 | TGACCTCCAAGGCGAGCGGC | 498 |
| hZC3H12A_gRNA_139 | GGATCTCGGCAGCCAGCTGC | 499 |
| hZC3H12A_gRNA_140 | TCCTTTTCCTCTTCTGGGAG | 500 |
| hZC3H12A_gRNA_141 | CACGACGCGTGGGTGGCAAG | 501 |
| hZC3H12A_gRNA_142 | TTCACACCATCACGACGCGT | 502 |
| hZC3H12A_gRNA_143 | GCAGGAGCCTCGCACCTAGC | 503 |
| hZC3H12A_gRNA_144 | CACCCCTAAGGCTCCCAACC | 504 |
| hZC3H12A_gRNA_145 | TTGTCCTTGCTTGGGGCTCT | 505 |
| hZC3H12A_gRNA_146 | CAGGACAGGCTTCTCTCCAC | 506 |
| hZC3H12A_gRNA_147 | CACCTGGTGGAGGCTGTGAT | 507 |
| hZC3H12A_gRNA_148 | CGTCTGTGGGAGCCAGTCTG | 508 |
| hZC3H12A_gRNA_149 | CCCCCCAAAGTTCCGACATC | 509 |
| hZC3H12A_gRNA_150 | AGGCAGCCTGGCCAAGGAGC | 510 |
| hZC3H12A_gRNA_151 | TCTGCCTTTGGCCGGGCCAT | 511 |
| hZC3H12A_gRNA_152 | GGACAGGCTTCTCTCCACAG | 512 |
| hZC3H12A_gRNA_153 | ACGTGCCCATCACAGGTGAG | 513 |
| hZC3H12A_gRNA_154 | AGAGAGTGAGCAGTGCAGCC | 514 |
| hZC3H12A_gRNA_155 | CGCAGGAAGTTGTCCAGGCT | 515 |
| hZC3H12A_gRNA_156 | GGCTGGGAGCTCAGATCCAT | 516 |
| hZC3H12A_gRNA_157 | CAGCTCACCCAGCACCGTGT | 517 |
| hZC3H12A_gRNA_158 | CCAGCACATCCTGCGGGAAC | 518 |
| hZC3H12A_gRNA_159 | GACCTCCTTGTTCCCATGGC | 519 |
| hZC3H12A_gRNA_160 | GGGGTTCGAGGAGGAGGCCC | 520 |
| hZC3H12A_gRNA_161 | CAGAGAAGGCTGCGGTGGCT | 521 |
| hZC3H12A_gRNA_162 | GGGAGTGAGTCCAGCGTCTG | 522 |
| hZC3H12A_gRNA_163 | CAGGAGCCTCGCACCTAGCG | 523 |
| hZC3H12A_gRNA_164 | GGAGGAGGCCCTGGTGAGCC | 524 |
| hZC3H12A_gRNA_165 | CAAGCAAGGACAAAAATGGC | 525 |
| hZC3H12A_gRNA_166 | CGTCAGGGCACCCCAAGGCC | 526 |
| hZC3H12A_gRNA_167 | GCTGGCAGTGAACTGGTTTC | 527 |
| hZC3H12A_gRNA_168 | ACCTCCTTGTTCCCATGGCT | 528 |
| hZC3H12A_gRNA_169 | TCCCGCAGGATGTGCTGGTC | 529 |
| hZC3H12A_gRNA_170 | AGGGACTGTAGCCCGTGTAA | 530 |
| hZC3H12A_gRNA_171 | CCAGTACTCTCGAGGTGGAA | 531 |
| hZC3H12A_gRNA_172 | AATTCCCACAGACTCATGGT | 532 |
| hZC3H12A_gRNA_173 | CCCACCCCGAGCCCCTTACA | 533 |
| hZC3H12A_gRNA_174 | GTGCATTTCCTTCCTGGAAG | 534 |
| hZC3H12A_gRNA_175 | TCAGCGGCCAGCTCTTGACC | 535 |
| hZC3H12A_gRNA_176 | GGCCCGGCCAAAGGCAGAGA | 536 |
| hZC3H12A_gRNA_177 | ACAGAGCGCTGGGGGCAGCT | 537 |
| hZC3H12A_gRNA_178 | TCTTGATTCCTCTTCCAGGA | 538 |
| hZC3H12A_gRNA_179 | GCAAGGACAAAAATGGCCGG | 539 |
| hZC3H12A_gRNA_180 | CAGGGCAGGCAGCCTGGCCA | 540 |
| hZC3H12A_gRNA_181 | ATCTCGGCAGCCAGCTGCTG | 541 |
| hZC3H12A_gRNA_182 | CCCGCAGGATGTGCTGGTCT | 542 |
| hZC3H12A_gRNA_183 | GGCTCCAGGTTGGGAGCCTT | 543 |
| hZC3H12A_gRNA_184 | CAACACGGTGCTGGGTGAGC | 544 |
| hZC3H12A_gRNA_185 | GCAGCCGTGTCCCTATGGTA | 545 |
| hZC3H12A_gRNA_186 | TGTCCTTGCTTGGGGCTCTG | 546 |
| hZC3H12A_gRNA_187 | TCATGGTGGGGCTGGCTTCC | 547 |
| hZC3H12A_gRNA_188 | GAAGCTGGGCTATTCATCCA | 548 |
| hZC3H12A_gRNA_189 | GACCCTCTTGGCGGGACCCT | 549 |
| hZC3H12A_gRNA_190 | GGAAAGGCAGGGGGCGCGGG | 550 |
| hZC3H12A_gRNA_191 | AGGTCTGTGTTAGACCCTCT | 551 |
| hZC3H12A_gRNA_192 | CTCAGCTCCCTCTAGTCCCG | 552 |
| hZC3H12A_gRNA_193 | TAGGGACTGTAGCCCGTGTA | 553 |
| hZC3H12A_gRNA_194 | AGGGGGCATAAACCTGCAGA | 554 |
| hZC3H12A_gRNA_195 | CTCCCAGGATTGCCTGGACT | 555 |
| hZC3H12A_gRNA_196 | GGGATGAAGGTGAAGGCCGC | 556 |
| hZC3H12A_gRNA_197 | TGCAGAGCCCAGGGGCTGGC | 557 |
| hZC3H12A_gRNA_198 | GAATCGGCACTTGATCCCAT | 558 |
| hZC3H12A_gRNA_199 | CCGAGGCTGCTCCTTCCTCC | 559 |
| hZC3H12A_gRNA_200 | CCAGCTTCTGCAGGACGCTG | 560 |
| hZC3H12A_gRNA_201 | GGGCCGGCACGGGCCCAGCC | 561 |
| hZC3H12A_gRNA_202 | TGAGGTCTGGCGCTCCCGCT | 562 |
| hZC3H12A_gRNA_203 | TTGGGGTGCCCTGACGGCTG | 563 |
| hZC3H12A_gRNA_204 | ACTAGAGGGAGCTGAGGGCA | 564 |
| hZC3H12A_gRNA_205 | CCAGTTCCCGCAGGATGTGC | 565 |
| hZC3H12A_gRNA_206 | TATGCCCCCTGATGACCCAC | 566 |
| hZC3H12A_gRNA_207 | GTGAGAGGAGAGCATTGGCA | 567 |
| hZC3H12A_gRNA_208 | AGCTTACTCACTGGGGTGCT | 568 |
| hZC3H12A_gRNA_209 | ATCACAGCCTCCACCAGGTG | 569 |
| hZC3H12A_gRNA_210 | ACTGAAGTGGCCAGCACCCA | 570 |
| hZC3H12A_gRNA_211 | GCCGGCCCAGTGGGTCATCA | 571 |
| hZC3H12A_gRNA_212 | CCTGCAGAAGCTGGGCGTCC | 572 |
| hZC3H12A_gRNA_213 | GCACCGTGTTGGTGTCTGCC | 573 |
| hZC3H12A_gRNA_214 | GGCCCTGGAACTGCAGATGA | 574 |
| hZC3H12A_gRNA_215 | GTCCTTGCTTGGGGCTCTGG | 575 |
| hZC3H12A_gRNA_216 | CTCCCTGGAGAGCCAGATGT | 576 |
| hZC3H12A_gRNA_217 | AAATTCCCACAGACTCATGG | 577 |
| hZC3H12A_gRNA_218 | TCATCTGCCACAGAGCGCTG | 578 |
| hZC3H12A_gRNA_219 | AGTCGGCAGGGACACTGAAG | 579 |
| hZC3H12A_gRNA_220 | ACTCTCGAGGTGGAAAGGCA | 580 |
| hZC3H12A_gRNA_221 | CCCAGTGAGTAAGCTGCCTG | 581 |
| hZC3H12A_gRNA_222 | AGAGGGTGCAAAGAACTCTC | 582 |
| hZC3H12A_gRNA_223 | CACGATCCCGTCAGACTCGT | 583 |
| hZC3H12A_gRNA_224 | TCTGCACTGGGGGCTCCTGA | 584 |
| hZC3H12A_gRNA_225 | CAGGGGGCATAAACCTGCAG | 585 |
| hZC3H12A_gRNA_226 | TGAGGACAGCCACAGCCGTC | 586 |
| hZC3H12A_gRNA_227 | GTTTCCCCCGCACCTGGTGG | 587 |
| hZC3H12A_gRNA_228 | TTAGGGGTGCCACCACCCCG | 588 |
| hZC3H12A_gRNA_229 | ACTGGGGTGCTGGGACTTGT | 589 |
| hZC3H12A_gRNA_230 | CTCACTCCCGTACGTCTCCC | 590 |
| hZC3H12A_gRNA_231 | AGGGGCTGGCAGGAGCCCGT | 591 |
| hZC3H12A_gRNA_232 | TCCTTGTTCCCATGGCTGGG | 592 |
| hZC3H12A_gRNA_233 | GCCAAAGGCAGAGAAGGCTG | 593 |
| hZC3H12A_gRNA_234 | CACGGGCTCCTGCCAGCCCC | 594 |
| hZC3H12A_gRNA_235 | CCACAGCGTCCTGCAGAAGC | 595 |
| hZC3H12A_gRNA_236 | ACGGGCTCCTGCCAGCCCCT | 596 |
| hZC3H12A_gRNA_237 | ATGGGAGCAACGTGGCCATG | 597 |
| hZC3H12A_gRNA_238 | CCCAAGGCCGGGTCAAGAGC | 598 |
| hZC3H12A_gRNA_239 | AATTGCTGAGAAGGGGCCGA | 599 |
| hZC3H12A_gRNA_240 | GGGCAGGAGTGAGGAGGGCC | 600 |
| hZC3H12A_gRNA_241 | GGCGGGACCCTGGGGATGCC | 601 |
| hZC3H12A_gRNA_242 | GGGGCTGGCAGGAGCCCGTG | 602 |
| hZC3H12A_gRNA_243 | TTCCGACATCTGGCTCTCCA | 603 |
| hZC3H12A_gRNA_244 | GTGCTGCCCTTGCCAGCCAC | 604 |
| hZC3H12A_gRNA_245 | ACTCCTGCCGCTCGCCTTGG | 605 |
| hZC3H12A_gRNA_246 | GTGGACTTCTTCCGGAAGCT | 606 |
| hZC3H12A_gRNA_247 | CCAGTGCAGAGCCCAGGGGC | 607 |
| hZC3H12A_gRNA_248 | GGGGCAGTGGCAGCAGCTTT | 608 |
| hZC3H12A_gRNA_249 | GGGACTGTAGCCCGTGTAAG | 609 |
| hZC3H12A_gRNA_250 | CCACAGACTCATGGTGGGGC | 610 |
| hZC3H12A_gRNA_251 | AACACGGGACAGCCACCGAG | 611 |
| hZC3H12A_gRNA_252 | GCAAAGAACTCTCTGGAGGT | 612 |
| hZC3H12A_gRNA_253 | TGGGCCCGTGCCGGCCCAGT | 613 |
| hZC3H12A_gRNA_254 | CTCCTGCCGGGGCATCCTGC | 614 |
| hZC3H12A_gRNA_255 | AGGCAGACAGGTGAGAGGAA | 615 |
| hZC3H12A_gRNA_256 | AGGCAATCCTGGGAGACGTA | 616 |
| hZC3H12A_gRNA_257 | TCAGACCAGTACTCTCGAGG | 617 |
| hZC3H12A_gRNA_258 | AACATACTTGTCATTGACGA | 618 |
| hZC3H12A_gRNA_259 | GGCAGCTTGGCCGCTCTGGG | 619 |
| hZC3H12A_gRNA_260 | GAGTTCTTTGCACCCTCTGC | 620 |
| hZC3H12A_gRNA_261 | GCCACAGGCAGCTTACTCAC | 621 |
| hZC3H12A_gRNA_262 | AGGCTGCCTGCCCTGCCCCA | 622 |
| hZC3H12A_gRNA_263 | CCGGCCCAGTGGGTCATCAG | 623 |
| hZC3H12A_gRNA_264 | CTCTCGAGGTGGAAAGGCAG | 624 |
| hZC3H12A_gRNA_265 | GATTGCCTGGACTCGGGCAT | 625 |
| hZC3H12A_gRNA_266 | TCCTTGCTTGGGGCTCTGGG | 626 |
| hZC3H12A_gRNA_267 | GCAGAGAAGGCTGCGGTGGC | 627 |
| hZC3H12A_gRNA_268 | ACCGTGACCTCCAAGGCGAG | 628 |
| hZC3H12A_gRNA_269 | CAGGACGCTGTGGATCTCCG | 629 |
| hZC3H12A_gRNA_270 | AGGAAGCAGCCGTGTCCCTA | 630 |
| hZC3H12A_gRNA_271 | ACGCAGGAAGTTGTCCAGGC | 631 |
| hZC3H12A_gRNA_272 | GAGGTCCCCAAGAGGAAAAC | 632 |
| hZC3H12A_gRNA_273 | CCCCCAGCTTCTTCCCATCC | 633 |
| hZC3H12A_gRNA_274 | ATTCCCACAGACTCATGGTG | 634 |
| hZC3H12A_gRNA_275 | TCCAAGGCGAGCGGCAGGAG | 635 |
| hZC3H12A_gRNA_276 | GCTGGGAGCTCAGATCCATA | 636 |
| hZC3H12A_gRNA_277 | TGGGGGCCCAGGCATCCCCA | 637 |
| hZC3H12A_gRNA_278 | GGGTGCAAAGAACTCTCTGG | 638 |
| hZC3H12A_gRNA_279 | GCGGGACTAGAGGGAGCTGA | 639 |
| hZC3H12A_gRNA_280 | ACTGGAGAAGAAGAAGATCC | 640 |
| hZC3H12A_gRNA_281 | CCAGCTCTTGACCCGGCCTT | 641 |
| hZC3H12A_gRNA_282 | GAACTTTGGGGGGTTCGAGG | 642 |
| hZC3H12A_gRNA_283 | GAAACCAGTTCACTGCCAGC | 643 |
| hZC3H12A_gRNA_284 | ACAGCCGTCAGGGCACCCCA | 644 |
| hZC3H12A_gRNA_285 | CCACCCCGAGCCCCTTACAC | 645 |
| hZC3H12A_gRNA_286 | TCTCGGCAGCCAGCTGCTGG | 646 |
| hZC3H12A_gRNA_287 | AGAGAGCTGGACTGGGATGA | 647 |
| hZC3H12A_gRNA_288 | CCTTTCCACCTCGAGAGTAC | 648 |
| hZC3H12A_gRNA_289 | AAGCTGGCCTACGAGTCTGA | 649 |
| hZC3H12A_gRNA_290 | GTCTGTGGGAGCCAGTCTGT | 650 |
| hZC3H12A_gRNA_291 | AGACCTATGCCCCATCAGGC | 651 |
| hZC3H12A_gRNA_292 | TGGGAAGAAGCTGGGGGCCC | 652 |
| hZC3H12A_gRNA_293 | CTGTGGAGAGAAGCCTGTCC | 653 |
| hZC3H12A_gRNA_294 | GGGACTTCTAATTGCTGAGA | 654 |
| hZC3H12A_gRNA_295 | GGACTCGGGCATTGGCTCCC | 655 |
| hZC3H12A_gRNA_296 | CATCTGCCACAGAGCGCTGG | 656 |
| hZC3H12A_gRNA_297 | CTTCTGGGAGTGGAGGCTCC | 657 |
| hZC3H12A_gRNA_298 | GCCCCCAGTGCAGAGCCCAG | 658 |
| hZC3H12A_gRNA_299 | TTTGTCCTTGCTTGGGGCTC | 659 |
| hZC3H12A_gRNA_300 | GTGGGGCTGGCTTCCAGGAC | 660 |
| hZC3H12A_gRNA_301 | TCAAGAGCTGGCCGCTGAGG | 661 |
| hZC3H12A_gRNA_302 | CCTCTAGTCCCGCGGGGTGG | 662 |
| hZC3H12A_gRNA_303 | GCTCATCTGCCACAGAGCGC | 663 |
| hZC3H12A_gRNA_304 | CATGAGTCTGTGGGAATTTG | 664 |
| hZC3H12A_gRNA_305 | TGCGAGGCTCCTGCCTGATG | 665 |
| hZC3H12A_gRNA_306 | GGAGTGAGTCCAGCGTCTGT | 666 |
| hZC3H12A_gRNA_307 | TGCAAAGAACTCTCTGGAGG | 667 |
| hZC3H12A_gRNA_308 | CACAGCGTCCTGCAGAAGCT | 668 |
| hZC3H12A_gRNA_309 | CAGCTTACTCACTGGGGTGC | 669 |
| hZC3H12A_gRNA_310 | ACTGATGTGGGTGGGGGCAG | 670 |
| hZC3H12A_gRNA_311 | GCAGGATGTGCTGGTCTGGG | 671 |
| hZC3H12A_gRNA_312 | TCACAGTGTTTGTGCCATCC | 672 |
| hZC3H12A_gRNA_313 | GTTTGTGCCATCCTGGAGGA | 673 |
| hZC3H12A_gRNA_314 | TCCTGAAGGACTGATGTGGG | 674 |
| hZC3H12A_gRNA_315 | TGTTAGCAGAGAGCTGGACT | 675 |
| hZC3H12A_gRNA_316 | CAGTGTTTGTGCCATCCTGG | 676 |
| hZC3H12A_gRNA_317 | AGTCTGTCAGGGCCTCTGGG | 677 |
| hZC3H12A_gRNA_318 | TCTCGAGGTGGAAAGGCAGG | 678 |
| hZC3H12A_gRNA_319 | AGACTGGCTCCCACAGACGC | 679 |
| hZC3H12A_gRNA_320 | AGCCACTCACTTTGGAGCAC | 680 |
| hZC3H12A_gRNA_321 | TCCCAGGATTGCCTGGACTC | 681 |
| hZC3H12A_gRNA_322 | CCTGGAACTGCAGATGAAGG | 682 |
| hZC3H12A_gRNA_323 | GGGGCGCTTCCCACAGCTCC | 683 |
| hZC3H12A_gRNA_324 | CAGCCCCTGGGCTCTGCACT | 684 |
| hZC3H12A_gRNA_325 | GCGCGGGTGGGTAGTCGGCA | 685 |
| hZC3H12A_gRNA_326 | GCCCCAAGCAAGGACAAAAA | 686 |
| hZC3H12A_gRNA_327 | AGCCTGGATGGGAAGAAGCT | 687 |
| hZC3H12A_gRNA_328 | CAGCTCTTGACCCGGCCTTG | 688 |
| hZC3H12A_gRNA_329 | TAGGGGTGCCACCACCCCGC | 689 |
| hZC3H12A_gRNA_330 | TCCACTCCCAGAAGAGGAAA | 690 |
| hZC3H12A_gRNA_331 | GGAAGCGCTTCATCGAGGAG | 691 |
| hZC3H12A_gRNA_332 | GCATCCTGCTGGCAGTGAAC | 692 |
| hZC3H12A_gRNA_333 | TGGATGAATAGCCCAGCTTC | 693 |
| hZC3H12A_gRNA_334 | ACACGGGACAGCCACCGAGC | 694 |
| hZC3H12A_gRNA_335 | GGGCTCCTGAAGGACTGATG | 695 |
| hZC3H12A_gRNA_336 | CAGCCTGGATGGGAAGAAGC | 696 |
| hZC3H12A_gRNA_337 | TTTTCCTCTTCTGGGAGTGG | 697 |
| hZC3H12A_gRNA_338 | CTCCAGGTTGGGAGCCTTAG | 698 |
| hZC3H12A_gRNA_339 | GGGAGCTGAGGGCAGGGGTC | 699 |
| hZC3H12A_gRNA_340 | AGATGAAGGTGGACTTCTTC | 700 |
| hZC3H12A_gRNA_341 | TTTGGCCGGGCCATGGGTGC | 701 |
| hZC3H12A_gRNA_342 | CTCGCACCTAGCGGGGGCAG | 702 |
| hZC3H12A_gRNA_343 | CCCGTGTAAGGGGCTCGGGG | 703 |
| hZC3H12A_gRNA_344 | TGCCGGCCCAGTGGGTCATC | 704 |
| hZC3H12A_gRNA_345 | AAAGGCAGAGAAGGCTGCGG | 705 |
| hZC3H12A_gRNA_346 | AGGAGCCCGTGGGGCAGGGC | 706 |
| hZC3H12A_gRNA_347 | TAAGGGGCTCGGGGTGGGCC | 707 |
| hZC3H12A_gRNA_348 | ACACCATCACGACGCGTGGG | 708 |
| hZC3H12A_gRNA_349 | CTGGCAGGAGCCCGTGGGGC | 709 |
| hZC3H12A_gRNA_350 | CCGGCCTTGGGGTGCCCTGA | 710 |
| hZC3H12A_gRNA_351 | CTGTGTTAGACCCTCTTGGC | 711 |
| hZC3H12A_gRNA_352 | GTGATGGGCACGTCGGGCCG | 712 |
| hZC3H12A_gRNA_353 | GCCCCTGGGCTCTGCACTGG | 713 |
| hZC3H12A_gRNA_354 | CTGGGTGAGCTGGTGAAACA | 714 |
| hZC3H12A_gRNA_355 | GGCTGCTCCTTCCTCCAGGA | 715 |
| hZC3H12A_gRNA_356 | ACAGCCTCCACCAGGTGCGG | 716 |
| hZC3H12A_gRNA_357 | TGCCCGAGTCCAGGCAATCC | 717 |
| hZC3H12A_gRNA_358 | AGGTGGAAAGGCAGGGGGCG | 718 |
| hZC3H12A_gRNA_359 | CGACAGATTCATTGTGAAGC | 719 |
| hZC3H12A_gRNA_360 | GCGGGGTGGTGGCACCCCTA | 720 |
| hZC3H12A_gRNA_361 | GGCAATCCTGGGAGACGTAC | 721 |
| hZC3H12A_gRNA_362 | GCCGCTCGCCTTGGAGGTCA | 722 |
| hZC3H12A_gRNA_363 | TCACTGCCAGCAGGATGCCC | 723 |
| hZC3H12A_gRNA_364 | CCTGAAGGACTGATGTGGGT | 724 |
| hZC3H12A_gRNA_365 | GTGCGAGGCTCCTGCCTGAT | 725 |
| hZC3H12A_gRNA_366 | GCACCTGGTGGAGGCTGTGA | 726 |
| hZC3H12A_gRNA_367 | TCACAGCCTCCACCAGGTGC | 727 |
| hZC3H12A_gRNA_368 | GCCGCTCTGGGTGGAAGAAT | 728 |
| hZC3H12A_gRNA_369 | GACTAGAGGGAGCTGAGGGC | 729 |
| hZC3H12A_gRNA_370 | TCAGCTCCCTCTAGTCCCGC | 730 |
| hZC3H12A_gRNA_371 | GGAGCCTCCACTCCCAGAAG | 731 |
| hZC3H12A_gRNA_372 | AGACCCTCTTGGCGGGACCC | 732 |
| hZC3H12A_gRNA_373 | CCACCTTCATCTGCAGTTCC | 733 |
| hZC3H12A_gRNA_374 | GGGAGTGGAGGCTCCAGGTT | 734 |
| hZC3H12A_gRNA_375 | CAGTGAACTGGTTTCTGGAG | 735 |
| hZC3H12A_gRNA_376 | TCACCTGTGATGGGCACGTC | 736 |
| hZC3H12A_gRNA_377 | TGCCAGCAGGATGCCCCGGC | 737 |
| hZC3H12A_gRNA_378 | ACCCTCTTGGCGGGACCCTG | 738 |
| hZC3H12A_gRNA_379 | TGGGGGCAGCTTGGCCGCTC | 739 |
| hZC3H12A_gRNA_380 | AGGAGGAGGCCCTGGTGAGC | 740 |
| hZC3H12A_gRNA_381 | CTGGAGGTGGGAGCCATGCA | 741 |
| hZC3H12A_gRNA_382 | TCTGGAGGTGGGAGCCATGC | 742 |
| hZC3H12A_gRNA_383 | CCTGGATGGGAAGAAGCTGG | 743 |
| hZC3H12A_gRNA_384 | CCAGCCCCTGGGCTCTGCAC | 744 |
| hZC3H12A_gRNA_385 | GGAGTGGAAGCGCTTCATCG | 745 |
| hZC3H12A_gRNA_386 | TGTAGCCCGTGTAAGGGGCT | 746 |
| hZC3H12A_gRNA_387 | GGAGTGAGGAGGGCCGGGGA | 747 |
| hZC3H12A_gRNA_388 | GAGGTCACGGTATGTGTCGT | 748 |
| hZC3H12A_gRNA_389 | CTAGAGGGAGCTGAGGGCAG | 749 |
| hZC3H12A_gRNA_390 | TGGTGTGTTTCCCCCGCACC | 750 |
| hZC3H12A_gRNA_391 | CTGATGTGGGTGGGGGCAGT | 751 |
| hZC3H12A_gRNA_392 | AGGGCCGGGGAGGGCAGGCT | 752 |
| hZC3H12A_gRNA_393 | TGAGCTATGAGTGGCCCCTG | 753 |
| hZC3H12A_gRNA_394 | TCTTACGCAGGAAGTTGTCC | 754 |
| hZC3H12A_gRNA_395 | GTTCCGACATCTGGCTCTCC | 755 |
| hZC3H12A_gRNA_396 | AGGGGGCGCGGGTGGGTAGT | 756 |
| hZC3H12A_gRNA_397 | CGCTGGCCTGCTCCTTGGCC | 757 |
| hZC3H12A_gRNA_398 | GAAAGGCAGGGGGCGCGGGT | 758 |
| hZC3H12A_gRNA_399 | TAGCCCGTGTAAGGGGCTCG | 759 |
| hZC3H12A_gRNA_400 | CTGAGGGCAGGGGTCCGGTG | 760 |
| hZC3H12A_gRNA_401 | ACACAGCTTAGTATACACGC | 761 |
| hZC3H12A_gRNA_402 | CCGTCAGGGCACCCCAAGGC | 762 |
| hZC3H12A_gRNA_403 | GGCAGGGGTCCGGTGAGGTC | 763 |
| hZC3H12A_gRNA_404 | GGACTTGTAGGAGAGGATCT | 764 |
| hZC3H12A_gRNA_405 | TCCCAGCCATGGGAACAAGG | 765 |
| hZC3H12A_gRNA_406 | GACTTCTAATTGCTGAGAAG | 766 |
| hZC3H12A_gRNA_407 | GGCTCCTGAAGGACTGATGT | 767 |
| hZC3H12A_gRNA_408 | TGGCAGGAGCCCGTGGGGCA | 768 |
| hZC3H12A_gRNA_409 | AGACAGGTGAGAGGAAGGGC | 769 |
| hZC3H12A_gRNA_410 | TCGGAACTTTGGGGGGTTCG | 770 |
| hZC3H12A_gRNA_411 | GCCTGGATGGGAAGAAGCTG | 771 |
| hZC3H12A_gRNA_412 | TGAAGGACTGATGTGGGTGG | 772 |
| hZC3H12A_gRNA_413 | CTGGGGGCCCAGGCATCCCC | 773 |
| hZC3H12A_gRNA_414 | GAGCCCCCAGTGCAGAGCCC | 774 |
| hZC3H12A_gRNA_415 | GGCGCGGGTGGGTAGTCGGC | 775 |
| hZC3H12A_gRNA_416 | CCGTGTAAGGGGCTCGGGGT | 776 |
| hZC3H12A_gRNA_417 | GTCGTGATGGTGTGAACACC | 777 |
| hZC3H12A_gRNA_418 | ACGACGCGTGGGTGGCAAGC | 778 |
| hZC3H12A_gRNA_419 | GGGGGCAGTGGCAGCAGCTT | 779 |
| hZC3H12A_gRNA_420 | AGCGTGTATACTAAGCTGTG | 780 |
| hZC3H12A_gRNA_421 | GCTCCTGCCTGATGGGGCAT | 781 |
| hZC3H12A_gRNA_422 | GTCTGTCAGGGCCTCTGGGA | 782 |
| hZC3H12A_gRNA_423 | GTAGCCCGTGTAAGGGGCTC | 783 |
| hZC3H12A_gRNA_424 | AGCCCCTGGGCTCTGCACTG | 784 |
| hZC3H12A_gRNA_425 | GTGAACTGGTTTCTGGAGCG | 785 |
| hZC3H12A_gRNA_426 | CTACGAGTCTGACGGGATCG | 786 |
| hZC3H12A_gRNA_427 | AGTGAACTGGTTTCTGGAGC | 787 |
| hZC3H12A_gRNA_428 | ACGCGTGGGTGGCAAGCGGG | 788 |
| hZC3H12A_gRNA_429 | CGCGGGACTAGAGGGAGCTG | 789 |
| hZC3H12A_gRNA_430 | GGCAGGAGTGAGGAGGGCCG | 790 |
| hZC3H12A_gRNA_431 | AAGTGAGTGGCTTCTTACGC | 791 |
| hZC3H12A_gRNA_432 | CTGAAGGACTGATGTGGGTG | 792 |
| hZC3H12A_gRNA_433 | TTGCCACCCACGCGTCGTGA | 793 |
| hZC3H12A_gRNA_434 | AGGGCAGGAGTGAGGAGGGC | 794 |
| hZC3H12A_gRNA_435 | TCTTCTTCTCCAGTTCCCGC | 795 |
| hZC3H12A_gRNA_436 | AGGAGTGAGGAGGGCCGGGG | 796 |
| hZC3H12A_gRNA_437 | ACTCCCAGAAGAGGAAAAGG | 797 |
| hZC3H12A_gRNA_438 | TGAGGAGGGCCGGGGAGGGC | 798 |
| hZC3H12A_gRNA_439 | ACCTGGTGGAGGCTGTGATG | 799 |
| hZC3H12A_gRNA_440 | CAGGGCCGAGGCCTCCTCAG | 800 |
| hZC3H12A_gRNA_441 | TACTCTCGAGGTGGAAAGGC | 801 |
| hZC3H12A_gRNA_442 | TTGGGGCTCTGGGGGGTGAG | 802 |
| hZC3H12A_gRNA_443 | GCTCCTGGACCCCCAGCAGC | 803 |
| hZC3H12A_gRNA_444 | GGGGGGTGAGAGGAGAGCAT | 804 |
| hZC3H12A_gRNA_445 | CGGCCCAGTGGGTCATCAGG | 805 |
| hZC3H12A_gRNA_446 | AGGAAGGGCAGGAGTGAGGA | 806 |
| hZC3H12A_gRNA_447 | GAGGGCCGGGGAGGGCAGGC | 807 |
| hZC3H12A_gRNA_448 | TGCTGGGGGTCCAGGAGCTG | 808 |
| hZC3H12A_gRNA_449 | GCTGGGGGTCCAGGAGCTGT | 809 |
| hZC3H12A_gRNA_450 | TGAGAGGAAGGGCAGGAGTG | 810 |
| hZC3H12A_gRNA_451 | TGGGAGTGGAGGCTCCAGGT | 811 |
| hZC3H12A_gRNA_452 | GAGGAAGGGCAGGAGTGAGG | 812 |

TABLE 17
Exemplary murine Zc3h12a gRNA sequences

| Target | Sequence | SEQ ID |
|---|---|---|
| mZc3h12a_gRNA_1 | GCTGGCTGTGAACTGGTTTC | 208 |
| mZc3h12a_gRNA_2 | CTAGTTCCCGAAGGATGTGC | 209 |
| mZc3h12a_gRNA_3 | ATTGGAGACCACCACTCCGT | 210 |
| mZc3h12a_gRNA_4 | TTCCCTCCTCTGCCAGCCAT | 211 |
| mZc3h12a_gRNA_5 | CGAAGGAAGTTGTCCAGGCT | 212 |
| mZc3h12a_gRNA_6 | ATACCTGTGATAGGCACATC | 213 |
| mZc3h12a_gRNA_7 | GACTTCCTTGTTCCCATGGC | 214 |
| mZc3h12a_gRNA_8 | GGCCTTCGAATCCGACGGAG | 215 |

[0312] In some embodiments, the gene-regulating system comprises at least two gRNA molecules, wherein at least one gRNA molecule comprises a SOCS1-targeting nucleic acid-binding segment (i.e., a SOCS1-targeting gRNA) and at least one gRNA molecule comprises a PTPN2-targeting nucleic acid-binding segment (i.e., a PTPN2-targeting gRNA). In some embodiments, the nucleic acid-binding segment of the at least one SOCS1-targeting gRNA binds to a target DNA sequence that is at least 95%, 96%, 97%, 98%, or 99% identical to a DNA sequence in the SOCS1 gene (SEQ ID NO: 1) or the Socs1 gene (SEQ ID NO: 2) and the nucleic acid-binding segment of the at least one PTPN2-targeting gRNA binds to a target DNA sequence that is at least 95%, 96%, 97%, 98%, or 99% identical to a DNA sequence in the PTPN2 gene (SEQ ID NO: 3) or the Ptpn2 gene (SEQ ID NO: 4). In some embodiments, the nucleic acid-binding segment of the at least one SOCS1-targeting gRNA binds to a target DNA sequence that is 100% identical to a DNA sequence in the SOCS1 gene (SEQ ID NO: 1) or the Socs1 gene (SEQ ID NO: 2) and the nucleic acid-binding segment of the at least one PTPN2-targeting gRNA binds to a target DNA sequence that is 100% identical to a DNA sequence in the PTPN2 gene (SEQ ID NO: 3) or the Ptpn2 gene (SEQ ID NO: 4).

[0313] In some embodiments, the nucleic acid-binding segment of the at least one SOCS1-targeting gRNA binds to a target DNA sequence that is at least 95%, 96%, 97%, 98%, or 99% identical to a DNA sequence defined by a set of genomic coordinates shown in Table 3 or Table 4 and the nucleic acid-binding segment of the at least one PTPN2-targeting gRNA binds to a target DNA sequence that is at least 95%, 96%, 97%, 98%, or 99% identical to a DNA sequence defined by a set of genomic coordinates shown in Table 5 or Table 6. In some embodiments, the nucleic acid-binding segment of the at least one SOCS1-targeting gRNA binds to a target DNA sequence that is 100% identical to a DNA sequence defined by a set of genomic coordinates shown in Table 3 or Table 4 and the nucleic acid-binding segment of the at least one PTPN2-targeting gRNA binds to a target DNA sequence that is 100% identical to a DNA sequence defined by a set of genomic coordinates shown in Table 5 or Table 6.

[0314] In some embodiments, the nucleic acid-binding segment of the at least one SOCS1-targeting gRNA binds to a target DNA sequence that is at least 95%, 96%, 97%, 98%, or 99% identical to one of SEQ ID NOs: 7-151 and the nucleic acid-binding segment of the at least one PTPN2-targeting gRNA binds to a target DNA sequence that is at least 95%, 96%, 97%, 98%, or 99% identical to one of SEQ ID NOs: 185-207. In some embodiments, the nucleic acid-binding segment of the at least one SOCS1-targeting gRNA binds to a target DNA sequence that is 100% identical to one of SEQ ID NOs: 7-151 and the nucleic acid-binding segment of the at least one PTPN2-targeting gRNA binds to a target DNA sequence that is 100% identical to one of SEQ ID NOs: 185-207. Exemplary SOCS1 target DNA sequences are shown in Tables 12 and 13 and exemplary PTPN2 target DNA sequences are shown in Tables 14 and 15.

[0315] In some embodiments, the nucleic acid-binding segment of the at least one SOCS1-targeting gRNA is encoded by a DNA sequence that is at least 95%, 96%, 97%, 98%, or 99% identical to one of SEQ ID NOs: 7-151 and the nucleic acid-binding segment of the at least one PTPN2-targeting gRNA is encoded by a DNA sequence that is at least 95%, 96%, 97%, 98%, or 99% identical to one of SEQ ID NOs: 185-207. In some embodiments, the nucleic acid-binding segment of the at least one SOCS1-targeting gRNA is encoded by a DNA sequence that is 100% identical to one of SEQ ID NOs: 7-151 and the nucleic acid-binding segment of the at least one PTPN2-targeting gRNA is encoded by a DNA sequence that is 100% identical to one of SEQ ID NOs: 185-207. Exemplary DNA sequences encoding the nucleic acid-binding segment of the SOCS1-targeting gRNAs are shown in Tables 12 and 13 and exemplary DNA sequences encoding the nucleic acid-binding segment of the PTPN2-targeting gRNAs are shown in Tables 14 and 15.

[0316] In some embodiments, the gene-regulating system comprises at least two gRNA molecules, wherein at least one gRNA molecule comprises a SOCS1-targeting nucleic acid-binding segment (i.e., a SOCS1-targeting gRNA) and at least one gRNA molecule comprises a ZC3H12A-targeting nucleic acid-binding segment (i.e., a ZC3H12A-targeting gRNA). In some embodiments, the nucleic acid-binding segment of the at least one SOCS1-targeting gRNA binds to a target DNA sequence that is at least 95%, 96%, 97%, 98%, or 99% identical to a DNA sequence in the SOCS1 gene (SEQ ID NO: 1) or the Socs1 gene (SEQ ID NO: 2) and the nucleic acid-binding segment of the at least one ZC3H12A-targeting gRNA binds to a target DNA sequence that is at least 95%, 96%, 97%, 98%, or 99% identical to a DNA sequence in the ZC3H12A gene (SEQ ID NO: 5) or the Zc3h12a gene (SEQ ID NO: 6). In some embodiments, the nucleic acid-binding segment of the at least one SOCS1-targeting gRNA binds to a target DNA sequence that is 100% identical to a DNA sequence in the SOCS1 gene (SEQ ID NO: 1) or the Socs1 gene (SEQ ID NO: 2) and the nucleic acid-binding segment of the at least one ZC3H12A-targeting gRNA binds to a target DNA sequence that is 100% identical to a DNA sequence in the ZC3H12A gene (SEQ ID NO: 5) or the Zc3h12a gene (SEQ ID NO: 6).

[0317] In some embodiments, the nucleic acid-binding segment of the at least one SOCS1-targeting gRNA binds to a target DNA sequence that is at least 95%, 96%, 97%, 98%, or 99% identical to a DNA sequence defined by a set of genomic coordinates shown in Table 3 or Table 4 and the nucleic acid-binding segment of the at least one ZC3H12A-targeting gRNA binds to a target DNA sequence that is at least 95%, 96%, 97%, 98%, or 99% identical to a DNA sequence defined by a set of genomic coordinates shown in Table 7 or Table 8. In some embodiments, the nucleic acid-binding segment of the at least one SOCS1-targeting gRNA binds to a target DNA sequence that is 100% identical to a DNA sequence defined by a set of genomic coordinates shown in Table 3 or Table 4 and the nucleic acid-binding segment of the at least one ZC3H12A-targeting gRNA binds to a target DNA sequence that is 100% identical to a DNA sequence defined by a set of genomic coordinates shown in Table 7 or Table 8.

[0318] In some embodiments, the nucleic acid-binding segment of the at least one SOCS1-targeting gRNA binds to a target DNA sequence that is at least 95%, 96%, 97%, 98%, or 99% identical to one of SEQ ID NOs: 7-151 and the nucleic acid-binding segment of the at least one ZC3H12A-targeting gRNA binds to a target DNA sequence that is at least 95%, 96%, 97%, 98%, or 99% identical to one of SEQ ID NOs: 208-230. In some embodiments, the nucleic acid-binding segment of the at least one SOCS1-targeting gRNA binds to a target DNA sequence that is 100% identical to one of SEQ ID NOs: 7-151 and the nucleic acid-binding segment of the at least one ZC3H12A-targeting gRNA binds to a target DNA sequence that is 100% identical to one of SEQ ID NOs: 208-230. Exemplary SOCS1 target DNA sequences are shown in Tables 12 and 13 and exemplary ZC3H12A target DNA sequences are shown in Tables 16 and 17.

[0319] In some embodiments, the nucleic acid-binding segment of the at least one SOCS1-targeting gRNA is encoded by a DNA sequence that is at least 95%, 96%, 97%, 98%, or 99% identical to one of SEQ ID NOs: 7-151 and the nucleic acid-binding segment of the at least one ZC3H12A-targeting gRNA is encoded by a DNA sequence that is at least 95%, 96%, 97%, 98%, or 99% identical to one of SEQ ID NOs: 208-230. In some embodiments, the nucleic acid-binding segment of the at least one SOCS1-targeting gRNA is encoded by a DNA sequence that is 100% identical to one of SEQ ID NOs: 7-151 and the nucleic acid-binding segment of the at least one ZC3H12A-targeting gRNA is encoded by a DNA sequence that is 100% identical to one of SEQ ID NOs: 208-230. Exemplary DNA sequences encoding the nucleic acid-binding segment of the SOCS1-targeting gRNAs are shown in Tables 12 and 13 and exemplary DNA sequences encoding the nucleic acid-binding segment of the ZC3H12A-targeting gRNAs are shown in Tables 16 and 17.

[0320] In some embodiments, the gene-regulating system comprises at least two gRNA molecules, wherein at least one gRNA molecule comprises a PTPN2-targeting nucleic acid-binding segment (i.e., a PTPN2-targeting gRNA) and at least one gRNA molecule comprises a ZC3H12A-targeting nucleic acid-binding segment (i.e., a ZC3H12A-targeting gRNA). In some embodiments, the nucleic acid-binding segment of the at least one PTPN2-targeting gRNA binds to a target DNA sequence that is at least 95%, 96%, 97%, 98%, or 99% identical to a DNA sequence in the PTPN2 gene (SEQ ID NO: 3) or the Ptpn2 gene (SEQ ID NO: 4) and the nucleic acid-binding segment of the at least one ZC3H12A-targeting gRNA binds to a target DNA sequence that is at least 95%, 96%, 97%, 98%, or 99% identical to a DNA sequence in the ZC3H12A gene (SEQ ID NO: 5) or the Zc3h12a gene (SEQ ID NO: 6). In some embodiments, the nucleic acid-binding segment of the at least one PTPN2-targeting gRNA binds to a target DNA sequence that is 100% identical to a DNA sequence in the PTPN2 gene (SEQ ID NO: 3) or the Ptpn2 gene (SEQ ID NO: 4) and the nucleic acid-binding segment of the at least one ZC3H12A-targeting gRNA binds to a target DNA sequence that is 100% identical to a DNA sequence in the ZC3H12A gene (SEQ ID NO: 5) or the Zc3h12a gene (SEQ ID NO: 6).

[0321] In some embodiments, the nucleic acid-binding segment of the at least one PTPN2-targeting gRNA binds to a target DNA sequence that is at least 95%, 96%, 97%, 98%, or 99% identical to a DNA sequence defined by a set of genomic coordinates shown in Table 5 or Table 6 and the nucleic acid-binding segment of the at least one ZC3H12A-targeting gRNA binds to a target DNA sequence that is at least 95%, 96%, 97%, 98%, or 99% identical to a DNA sequence defined by a set of genomic coordinates shown in Table 7 or Table 8. In some embodiments, the nucleic acid-binding segment of the at least one PTPN2-targeting gRNA binds to a target DNA sequence that is 100% identical to a DNA sequence defined by a set of genomic coordinates shown in Table 5 or Table 6 and the nucleic acid-binding segment of the at least one ZC3H12A-targeting gRNA binds to a target DNA sequence that is 100% identical to a DNA sequence defined by a set of genomic coordinates shown in Table 7 or Table 8.

[0322] In some embodiments, the nucleic acid-binding segment of the at least one PTPN2-targeting gRNA binds to a target DNA sequence that is at least 95%, 96%, 97%, 98%, or 99% identical to one of SEQ ID NOs: 185-207 and the nucleic acid-binding segment of the at least one ZC3H12A-targeting gRNA binds to a target DNA sequence that is at least 95%, 96%, 97%, 98%, or 99% identical to one of SEQ ID NOs: 208-230. In some embodiments, the nucleic acid-binding segment of the at least one PTPN2-targeting gRNA binds to a target DNA sequence that is 100% identical to one of SEQ ID NOs: 185-207 and the nucleic acid-binding segment of the at least one ZC3H/2A-targeting gRNA binds to a target DNA sequence that is 100% identical to one of SEQ ID NOs: 208-230. Exemplary PTPN2 target DNA sequences are shown in Tables 14 and 15 and exemplary ZC3H12A target DNA sequences are shown in Tables 16 and 17.

[0323] In some embodiments, the nucleic acid-binding segment of the at least one PTPN2-targeting gRNA is encoded by a DNA sequence that is at least 95%, 96%, 97%, 98%, or 99% identical to one of SEQ ID NOs: 185-207 and the nucleic acid-binding segment of the at least one ZC3H12A-targeting gRNA is encoded by a DNA sequence that is at least 95%, 96%, 97%, 98%, or 99% identical to one of SEQ ID NOs: 208-230. In some embodiments, the nucleic acid-binding segment of the at least one PTPN2-targeting gRNA is encoded by a DNA sequence that is 100% identical to one of SEQ ID NOs: 185-207 and the nucleic acid-binding segment of the at least one ZC3H/2A-targeting gRNA is encoded by a DNA sequence that is 100% identical to one of SEQ ID NOs: 208-230. Exemplary DNA sequences encoding the nucleic acid-binding segment of the PTPN2-targeting gRNAs are shown in Tables 14 and 15 and exemplary DNA sequences encoding the nucleic acid-binding segment of the ZC3H/2A-targeting gRNAs are shown in Tables 16 and 17.

[0324] In some embodiments, the nucleic acid-binding segments of the gRNA sequences described herein are designed to minimize off-target binding using algorithms known in the art (e.g., Cas-OFF finder) to identify target sequences that are unique to a particular target locus or target gene.

[0325] In some embodiments, the gRNAs described herein can comprise one or more modified nucleosides or nucleotides which introduce stability toward nucleases. In such embodiments, these modified gRNAs may elicit a reduced innate immune as compared to a non-modified gRNA. The term “innate immune response” includes a cellular response to exogenous nucleic acids, including single stranded nucleic acids, generally of viral or bacterial origin, which involves the induction of cytokine expression and release, particularly the interferons, and cell death.

[0326] In some embodiments, the gRNAs described herein are modified at or near the 5′ end (e.g., within 1-10, 1-5, or 1-2 nucleotides of their 5′ end). In some embodiments, the 5′ end of a gRNA is modified by the inclusion of a eukaryotic mRNA cap structure or cap analog (e.g., a G(5′)ppp(5′)G cap analog, a m7G(5′)ppp(5′)G cap analog, or a 3′-O-Me-m7G(5′)ppp(5′)G anti reverse cap analog (ARCA)). In some embodiments, an in vitro transcribed gRNA is modified by treatment with a phosphatase (e.g., calf intestinal alkaline phosphatase) to remove the 5′ triphosphate group. In some embodiments, a gRNA comprises a modification at or near its 3′ end (e.g., within 1-10, 1-5, or 1-2 nucleotides of its 3′ end). For example, in some embodiments, the 3′ end of a gRNA is modified by the addition of one or more (e.g., 25-200) adenine (A) residues.

[0327] In some embodiments, modified nucleosides and modified nucleotides can be present in a gRNA, but also may be present in other gene-regulating systems, e.g., mRNA, RNAi, or siRNA-based systems. In some embodiments, modified nucleosides and nucleotides can include one or more of:

[0328] (a) alteration, e.g., replacement, of one or both of the non-linking phosphate oxygens and/or of one or more of the linking phosphate oxygens in the phosphodiester backbone linkage;

[0329] (b) alteration, e.g., replacement, of a constituent of the ribose sugar, e.g., of the 2′ hydroxyl on the ribose sugar;

[0330] (c) wholesale replacement of the phosphate moiety with “dephospho” linkers;

[0331] (d) modification or replacement of a naturally occurring nucleobase;

[0332] (e) replacement or modification of the ribose-phosphate backbone;

[0333] (f) modification of the 3′ end or 5′ end of the oligonucleotide, e.g., removal, modification or replacement of a terminal phosphate group or conjugation of a moiety; and

[0334] (g) modification of the sugar.

[0335] In some embodiments, the modifications listed above can be combined to provide modified nucleosides and nucleotides that can have two, three, four, or more modifications. For example, in some embodiments, a modified nucleoside or nucleotide can have a modified sugar and a modified nucleobase. In some embodiments, every base of a gRNA is modified. In some embodiments, each of the phosphate groups of a gRNA molecule are replaced with phosphorothioate groups.

[0336] In some embodiments, a software tool can be used to optimize the choice of gRNA within a user's target sequence, e.g., to minimize total off-target activity across the genome. Off target activity may be other than cleavage. For example, for each possible gRNA choice using S. pyogenes Cas9, software tools can identify all potential off-target sequences (preceding either NAG or NGG PAMs) across the genome that contain up to a certain number (e.g., 1, 2, 3, 4, 5, 6, 7, 8, 9, or 10) of mismatched base-pairs. The cleavage efficiency at each off-target sequence can be predicted, e.g., using an experimentally-derived weighting scheme. Each possible gRNA can then be ranked according to its total predicted off-target cleavage; the top-ranked gRNAs represent those that are likely to have the greatest on-target and the least off-target cleavage. Other functions, e.g., automated reagent design for gRNA vector construction, primer design for the on-target Surveyor assay, and primer design for high-throughput detection and quantification of off-target cleavage via next-generation sequencing, can also be included in the tool.

### IV. Methods of Producing Modified Immune Effector Cells

[0337] In some embodiments, the present disclosure provides methods for producing modified immune effector cells. In some embodiments, the methods comprise introducing a gene-regulating system into a population of immune effector cells wherein the gene-regulating system is capable of reducing expression and/or function of two or more endogenous target genes selected from SOCS1, PTPN2, and ZC3H12A.

[0338] The components of the gene-regulating systems described herein, e.g., a nucleic acid-, protein-, or nucleic acid/protein-based system can be introduced into target cells in a variety of forms using a variety of delivery methods and formulations. In some embodiments, a polynucleotide encoding one or more components of the system is delivered by a recombinant vector (e.g., a viral vector or plasmid). In some embodiments, where the system comprises more than a single component, a vector may comprise a plurality of polynucleotides, each encoding a component of the system. In some embodiments, where the system comprises more than a single component, a plurality of vectors may be used, wherein each vector comprises a polynucleotide encoding a particular component of the system. In some embodiments, a vector may also comprise a sequence encoding a signal peptide (e.g., for nuclear localization, nucleolar localization, mitochondrial localization), fused to the polynucleotide encoding the one or more components of the system. For example, a vector may comprise a nuclear localization sequence (e.g., from SV40) fused to the polynucleotide encoding the one or more components of the system. In some embodiments, the introduction of the gene-regulating system to the cell occurs in vitro. In some embodiments, the introduction of the gene-regulating system to the cell occurs in vivo. In some embodiments, the introduction of the gene-regulating system to the cell occurs ex vivo.

[0339] In some embodiments, the recombinant vector comprising a polynucleotide encoding one or more components of a gene-regulating system described herein is a viral vector. Suitable viral vectors include, but are not limited to, viral vectors based on vaccinia virus; poliovirus; adenovirus (see, e.g., Li et al., Invest Opthalmol Vis Sci 35:2543 2549, 1994; Borras et al., Gene Ther 6:515 524, 1999; Li and Davidson, PNAS 92:7700 7704, 1995; Sakamoto et al., H Gene Ther 5:1088 1097, 1999; WO 94/12649, WO 93/03769; WO 93/19191; WO 94/28938; WO 95/11984 and WO 95/00655); adeno-associated virus (see, e.g., U.S. Pat. No. 7,078,387; Ali et al., Hum Gene Ther 9:81 86, 1998, Flannery et al, PNAS 94:6916 6921, 1997; Bennett et al., Invest Opthalmol Vis Sci 38:2857 2863, 1997; Jomary et al., Gene Ther 4:683 690, 1997, Rolling et al., Hum Gene Ther 10:641 648, 1999; Ali et al., Hum Mol Genet 5:591 594, 1996; Srivastava in WO 93/09239, Samulski et al., J. Vir. (1989) 63:3822-3828; Mendelson et al, Virol. (1988) 166:154-165; and Flotte et al., PNAS (1993) 90:10613-10617); SV40; herpes simplex virus; human immunodeficiency virus (see, e.g., Miyoshi et al., PNAS 94:10319 23, 1997; Takahashi et al., J Virol 73:7812 7816, 1999); a retroviral vector (e.g., Murine Leukemia Virus, spleen necrosis virus, and vectors derived from retroviruses such as Rous Sarcoma Virus, Harvey Sarcoma Virus, avian leukosis virus, a lentivirus, human immunodeficiency virus, myeloproliferative sarcoma virus, and mammary tumor virus); and the like.

[0340] In some embodiments, the recombinant vector comprising a polynucleotide encoding one or more components of a gene-regulating system described herein is a plasmid. Numerous suitable plasmid expression vectors are known to those of skill in the art, and many are commercially available. The following vectors are provided by way of example; for eukaryotic host cells: pXT1, pSG5 (Stratagene), pSVK3, pBPV, pMSG, and pSVLSV40 (Pharmacia). However, any other plasmid vector may be used so long as it is compatible with the host cell. Depending on the cell type and gene-regulating system utilized, any of a number of suitable transcription and translation control elements, including constitutive and inducible promoters, transcription enhancer elements, transcription terminators, etc. may be used in the expression vector (see e.g., Bitter et al. (1987) Methods in Enzymology, 153:516-544).

[0341] In some embodiments, a polynucleotide sequence encoding one or more components of a gene-regulating system described herein is operably linked to a control element, e.g., a transcriptional control element, such as a promoter. The transcriptional control element may be functional in either a eukaryotic cell (e.g., a mammalian cell) or a prokaryotic cell (e.g., bacterial or archaeal cell). In some embodiments, a polynucleotide sequence encoding one or more components of a gene-regulating system described herein is operably linked to multiple control elements that allow expression of the polynucleotide in both prokaryotic and eukaryotic cells. Depending on the cell type and gene-regulating system utilized, any of a number of suitable transcription and translation control elements, including constitutive and inducible promoters, transcription enhancer elements, transcription terminators, etc. may be used in the expression vector (see e.g., Bitter et al. (1987) Methods in Enzymology, 153:516-544).

[0342] Non-limiting examples of suitable eukaryotic promoters (promoters functional in a eukaryotic cell) include those from cytomegalovirus (CMV) immediate early, herpes simplex virus (HSV) thymidine kinase, early and late SV40, long terminal repeats (LTRs) from retrovirus, and mouse metallothionein-1. Selection of the appropriate vector and promoter is well within the level of ordinary skill in the art. The expression vector may also contain a ribosome binding site for translation initiation and a transcription terminator. The expression vector may also include appropriate sequences for amplifying expression. The expression vector may also include nucleotide sequences encoding protein tags (e.g., 6xHis tag, hemagglutinin tag, green fluorescent protein, etc.) that are fused to the site-directed modifying polypeptide, thus resulting in a chimeric polypeptide.

[0343] In some embodiments, a polynucleotide sequence encoding one or more components of a gene-regulating system described herein is operably linked to an inducible promoter. In some embodiments, a polynucleotide sequence encoding one or more components of a gene-regulating system described herein is operably linked to a constitutive promoter.

[0344] Methods of introducing polynucleotides and recombinant vectors into a host cell are known in the art, and any known method can be used to introduce components of a gene-regulating system into a cell. Suitable methods include e.g., viral or bacteriophage infection, transfection, conjugation, protoplast fusion, lipofection, electroporation, calcium phosphate precipitation, polyethyleneimine (PEI)-mediated transfection, DEAE-dextran mediated transfection, liposome-mediated transfection, particle gun technology, calcium phosphate precipitation, direct micro injection, nanoparticle-mediated nucleic acid delivery (see, e.g., Panyam et al., Adv Drug Deliv Rev. 2012 Sep. 13. pii: 50169-409X(12)00283-9), microfluidics delivery methods (See e.g., International PCT Publication No. WO 2013/059343), and the like. In some embodiments, delivery via electroporation comprises mixing the cells with the components of a gene-regulating system in a cartridge, chamber, or cuvette and applying one or more electrical impulses of defined duration and amplitude. In some embodiments, cells are mixed with components of a gene-regulating system in a vessel connected to a device (e.g., a pump) which feeds the mixture into a cartridge, chamber, or cuvette wherein one or more electrical impulses of defined duration and amplitude are applied, after which the cells are delivered to a second vessel.

[0345] In some embodiments, one or more components of a gene-regulating system, or polynucleotide sequence encoding one or more components of a gene-regulating system described herein are introduced to a cell in a non-viral delivery vehicle, such as a transposon, a nanoparticle (e.g., a lipid nanoparticle), a liposome, an exosome, an attenuated bacterium, or a virus-like particle. In some embodiments, the vehicle is an attenuated bacterium (e.g., naturally or artificially engineered to be invasive but attenuated to prevent pathogenesis including Listeria monocytogenes, certain Salmonella strains, Bifidobacterium longum, and modified Escherichia coli), bacteria having nutritional and tissue-specific tropism to target specific cells, and bacteria having modified surface proteins to alter target cell specificity. In some embodiments, the vehicle is a genetically modified bacteriophage (e.g., engineered phages having large packaging capacity, less immunogenicity, containing mammalian plasmid maintenance sequences and having incorporated targeting ligands). In some embodiments, the vehicle is a mammalian virus-like particle. For example, modified viral particles can be generated (e.g., by purification of the “empty” particles followed by ex vivo assembly of the virus with the desired cargo). The vehicle can also be engineered to incorporate targeting ligands to alter target tissue specificity. In some embodiments, the vehicle is a biological liposome. For example, the biological liposome is a phospholipid-based particle derived from human cells (e.g., erythrocyte ghosts, which are red blood cells broken down into spherical structures derived from the subject and wherein tissue targeting can be achieved by attachment of various tissue or cell-specific ligands), secretory exosomes, or subject derived membrane-bound nanovescicles (30-100 nm) of endocytic origin (e.g., can be produced from various cell types and can therefore be taken up by cells without the need for targeting ligands).

[0346] In some embodiments, the methods of modified immune effector cells described herein comprise obtaining a population of immune effector cells from a sample. In some embodiments, a sample comprises a tissue sample, a fluid sample, a cell sample, a protein sample, or a DNA or RNA sample. In some embodiments, a tissue sample may be derived from any tissue type including, but not limited to skin, hair (including roots), bone marrow, bone, muscle, salivary gland, esophagus, stomach, small intestine (e.g., tissue from the duodenum, jejunum, or ileum), large intestine, liver, gallbladder, pancreas, lung, kidney, bladder, uterus, ovary, vagina, placenta, testes, thyroid, adrenal gland, cardiac tissue, thymus, spleen, lymph node, spinal cord, brain, eye, ear, tongue, cartilage, white adipose tissue, or brown adipose tissue. In some embodiments, a tissue sample may be derived from a cancerous, pre-cancerous, or non-cancerous tumor. In some embodiments, a fluid sample comprises buccal swabs, blood, plasma, oral mucous, vaginal mucous, peripheral blood, cord blood, saliva, semen, urine, ascites fluid, pleural fluid, spinal fluid, pulmonary lavage, tears, sweat, semen, seminal fluid, seminal plasma, prostatic fluid, pre-ejaculatory fluid (Cowper's fluid), excreta, cerebrospinal fluid, lymph, cell culture media comprising one or more populations of cells, buffered solutions comprising one or more populations of cells, and the like.

[0347] In some embodiments, the sample is processed to enrich or isolate a particular cell type, such as an immune effector cell, from the remainder of the sample. In certain embodiments, the sample is a peripheral blood sample which is then subject to leukopheresis to separate the red blood cells and platelets and to isolate lymphocytes. In some embodiments, the sample is a leukopak from which immune effector cells can be isolated or enriched. In some embodiments, the sample is a tumor sample that is further processed to isolate lymphocytes present in the tumor (i.e., to isolate tumor infiltrating lymphocytes).

[0348] In some embodiments, the isolated immune effector cells are expanded in culture to produce an expanded population of immune effector cells. One or more activating or growth factors may be added to the culture system during the expansion process. For example, in some embodiments, one or more cytokines (such as IL-2, IL-15, and/or IL-7) can be added to the culture system to enhance or promote cell proliferation and expansion. In some embodiments, one or more activating antibodies, such as an anti-CD3 antibody, may be added to the culture system to enhance or promote cell proliferation and expansion. In some embodiments, the immune effector cells may be co-cultured with feeder cells during the expansion process. In some embodiments, the methods provided herein comprise one or more expansion phases. For example, in some embodiments, the immune effector cells can be expanded after isolation from a sample, allowed to rest, and then expanded again. In some embodiments, the immune effector cells can be expanded in one set of expansion conditions followed by a second round of expansion in a second, different, set of expansion conditions. Methods for ex vivo expansion of immune cells are known in the art, for example, as described in US Patent Application Publication Nos. 20180282694 and 20170152478 and U.S. Pat. Nos. 8,383,099 and 8,034,334.

[0349] At any point during the culture and expansion process, the gene-regulating systems described herein can be introduced to the immune effector cells to produce a population of modified immune effector cells. In some embodiments, the gene-regulating system is introduced to the population of immune effector cells immediately after enrichment from a sample. In some embodiments, the gene-regulating system is introduced to the population of immune effector cells before, during, or after the one or more expansion process. In some embodiments, the gene-regulating system is introduced to the population of immune effector cells immediately after enrichment from a sample or harvest from a subject, and prior to any expansion rounds. In some embodiments, the gene-regulating system is introduced to the population of immune effector cells after a first round of expansion and prior to a second round of expansion. In some embodiments, the gene-regulating system is introduced to the population of immune effector cells after a first and a second round of expansion.

[0350] In some embodiments, the modified immune effector cells produced by the methods described herein may be used immediately. Alternatively, the cells may be frozen at liquid nitrogen temperatures and stored for long periods of time, being thawed and capable of being reused. In such cases, the cells will usually be frozen in 10% dimethylsulfoxide (DMSO), 50% serum, 40% buffered medium, or some other such solution as is commonly used in the art to preserve cells at such freezing temperatures, and thawed in a manner as commonly known in the art for thawing frozen cultured cells.

[0351] In some embodiments, the modified immune effector cells may be cultured in vitro under various culture conditions. The cells may be expanded in culture, i.e. grown under conditions that promote their proliferation. Culture medium may be liquid or semi-solid, e.g. containing agar, methylcellulose, etc. The cell population may be suspended in an appropriate nutrient medium, such as Iscove's modified DMEM or RPMI 1640, normally supplemented with fetal calf serum (about 5-10%), L-glutamine, a thiol, particularly 2-mercaptoethanol, and antibiotics, e.g. penicillin and streptomycin. The culture may contain growth factors to which the regulatory T cells are responsive. Growth factors, as defined herein, are molecules capable of promoting survival, growth and/or differentiation of cells, either in culture or in the intact tissue, through specific effects on a transmembrane receptor. Growth factors include polypeptides and non-polypeptide factors.

### A. Producing Modified Immune Effector Cells Using CRISPR/Cas Systems

[0352] In some embodiments, a method of producing a modified immune effector cell involves contacting a target DNA sequence with a complex comprising a gRNA and a Cas polypeptide. As discussed above, a gRNA and Cas polypeptide form a complex, wherein the DNA-binding domain of the gRNA targets the complex to a target DNA sequence and wherein the Cas protein (or heterologous protein fused to an enzymatically inactive Cas protein) modifies target DNA sequence. In some embodiments, this complex is formed intracellularly after introduction of the gRNA and Cas protein (or polynucleotides encoding the gRNA and Cas proteins) to a cell. In some embodiments, the nucleic acid encoding the Cas protein is a DNA nucleic acid and is introduced to the cell by transduction. In some embodiments, the Cas9 and gRNA components of a CRISPR/Cas gene editing system are encoded by a single polynucleotide molecule. In some embodiments, the polynucleotide encoding the Cas protein and gRNA component are comprised in a viral vector and introduced to the cell by viral transduction. In some embodiments, the Cas9 and gRNA components of a CRISPR/Cas gene editing system are encoded by different polynucleotide molecules. In some embodiments, the polynucleotide encoding the Cas protein is comprised in a first viral vector and the polynucleotide encoding the gRNA is comprised in a second viral vector. In some aspects of this embodiment, the first viral vector is introduced to a cell prior to the second viral vector. In some aspects of this embodiment, the second viral vector is introduced to a cell prior to the first viral vector. In such embodiments, integration of the vectors results in sustained expression of the Cas9 and gRNA components. However, sustained expression of Cas9 may lead to increased off-target mutations and cutting in some cell types. Therefore, in some embodiments, an mRNA nucleic acid sequence encoding the Cas protein may be introduced to the population of cells by transfection. In such embodiments, the expression of Cas9 will decrease over time, and may reduce the number of off target mutations or cutting sites.

[0353] In some embodiments, this complex is formed in a cell-free system by mixing the gRNA molecules and Cas proteins together and incubating for a period of time sufficient to allow complex formation. This pre-formed complex, comprising the gRNA and Cas protein and referred to herein as a CRISPR-ribonucleoprotein (CRISPR-RNP) can then be introduced to a cell in order to modify a target DNA sequence.

B. Producing Modified Immune Effector Cells Using shRNA Systems

[0354] In some embodiments, a method of producing a modified immune effector cell introducing into the cell one or more DNA polynucleotides encoding one or more shRNA molecules with sequence complementary to the mRNA transcript of a target gene. The immune effector cell can be modified to produce the shRNA by introducing specific DNA sequences into the cell nucleus via a small gene cassette. Both retroviruses and lentiviruses can be used to introduce shRNA-encoding DNAs into immune effector cells. The introduced DNA can either become part of the cell's own DNA or persist in the nucleus, and instructs the cell machinery to produce shRNAs. shRNAs may be processed by Dicer or AGO2-mediated slicer activity inside the cell to induce RNAi mediated gene knockdown.

### V. Compositions and Kits

[0355] The term “composition” as used herein refers to a formulation of a gene-regulating system or a modified immune effector cell described herein that is capable of being administered or delivered to a subject or cell. Typically, formulations include all physiologically acceptable compositions including derivatives and/or prodrugs, solvates, stereoisomers, racemates, or tautomers thereof with any physiologically acceptable carriers, diluents, and/or excipients. A “therapeutic composition” or “pharmaceutical composition” (used interchangeably herein) is a composition of a gene-regulating system or a modified immune effector cell capable of being administered to a subject for the treatment of a particular disease or disorder or contacted with a cell for modification of one or more endogenous target genes.

[0356] The phrase “pharmaceutically acceptable” is employed herein to refer to those compounds, materials, compositions, and/or dosage forms which are, within the scope of sound medical judgment, suitable for use in contact with the tissues of human beings and animals without excessive toxicity, irritation, allergic response, or other problem or complication, commensurate with a reasonable benefit/risk ratio.

[0357] As used herein “pharmaceutically acceptable carrier, diluent or excipient” includes without limitation any adjuvant, carrier, excipient, glidant, sweetening agent, diluent, preservative, dye/colorant, flavor enhancer, surfactant, wetting agent, dispersing agent, suspending agent, stabilizer, isotonic agent, solvent, surfactant, and/or emulsifier which has been approved by the United States Food and Drug Administration as being acceptable for use in humans and/or domestic animals. Exemplary pharmaceutically acceptable carriers include, but are not limited to, to sugars, such as lactose, glucose and sucrose; starches, such as corn starch and potato starch; cellulose, and its derivatives, such as sodium carboxymethyl cellulose, ethyl cellulose and cellulose acetate; tragacanth; malt; gelatin; talc; cocoa butter, waxes, animal and vegetable fats, paraffins, silicones, bentonites, silicic acid, zinc oxide; oils, such as peanut oil, cottonseed oil, safflower oil, sesame oil, olive oil, corn oil and soybean oil; glycols, such as propylene glycol; polyols, such as glycerin, sorbitol, mannitol and polyethylene glycol; esters, such as ethyl oleate and ethyl laurate; agar; buffering agents, such as magnesium hydroxide and aluminum hydroxide; alginic acid; pyrogen-free water; isotonic saline; Ringer's solution; ethyl alcohol; phosphate buffer solutions; and any other compatible substances employed in pharmaceutical formulations. Except insofar as any conventional media and/or agent is incompatible with the agents of the present disclosure, its use in therapeutic compositions is contemplated. Supplementary active ingredients also can be incorporated into the compositions.

[0358] “Pharmaceutically acceptable salt” includes both acid and base addition salts. Pharmaceutically-acceptable salts include the acid addition salts (formed with the free amino groups of the protein) and which are formed with inorganic acids such as, for example, hydrochloric acid, hydrobromic acid, sulfuric acid, nitric acid, phosphoric acid and the like, and organic acids such as, but not limited to, acetic acid, 2,2-dichloroacetic acid, adipic acid, alginic acid, ascorbic acid, aspartic acid, benzenesulfonic acid, benzoic acid, 4-acetamidobenzoic acid, camphoric acid, camphor-10-sulfonic acid, capric acid, caproic acid, caprylic acid, carbonic acid, cinnamic acid, citric acid, cyclamic acid, dodecylsulfuric acid, ethane-1,2-disulfonic acid, ethanesulfonic acid, 2-hydroxyethanesulfonic acid, formic acid, fumaric acid, galactaric acid, gentisic acid, glucoheptonic acid, gluconic acid, glucuronic acid, glutamic acid, glutaric acid, 2-oxo-glutaric acid, glycerophosphoric acid, glycolic acid, hippuric acid, isobutyric acid, lactic acid, lactobionic acid, lauric acid, maleic acid, malic acid, malonic acid, mandelic acid, methanesulfonic acid, mucic acid, naphthalene-1,5-disulfonic acid, naphthalene-2-sulfonic acid, 1-hydroxy-2-naphthoic acid, nicotinic acid, oleic acid, orotic acid, oxalic acid, palmitic acid, pamoic acid, propionic acid, pyroglutamic acid, pyruvic acid, salicylic acid, 4-aminosalicylic acid, sebacic acid, stearic acid, succinic acid, tartaric acid, thiocyanic acid, ptoluenesulfonic acid, trifluoroacetic acid, undecylenic acid, and the like. Salts formed with the free carboxyl groups can also be derived from inorganic bases such as, for example, sodium, potassium, lithium, ammonium, calcium, magnesium, iron, zinc, copper, manganese, aluminum salts and the like. Salts derived from organic bases include, but are not limited to, salts of primary, secondary, and tertiary amines, substituted amines including naturally occurring substituted amines, cyclic amines and basic ion exchange resins, such as ammonia, isopropylamine, trimethylamine, diethylamine, triethylamine, tripropylamine, diethanolamine, ethanolamine, deanol, 2-dimethylaminoethanol, 2-diethylaminoethanol, dicyclohexylamine, lysine, arginine, histidine, caffeine, procaine, hydrabamine, choline, betaine, benethamine, benzathine, ethylenediamine, glucosamine, methylglucamine, theobromine, triethanolamine, tromethamine, purines, piperazine, piperidine, N-ethylpiperidine, polyamine resins and the like. Particularly preferred organic bases are isopropylamine, diethylamine, ethanolamine, trimethylamine, dicyclohexylamine, choline and caffeine.

[0359] Wetting agents, emulsifiers and lubricants, such as sodium lauryl sulfate and magnesium stearate, as well as coloring agents, release agents, coating agents, sweetening, flavoring and perfuming agents, preservatives and antioxidants can also be present in the compositions.

[0360] Examples of pharmaceutically-acceptable antioxidants include: (1) water soluble antioxidants, such as ascorbic acid, cysteine hydrochloride, sodium bisulfate, sodium metabisulfite, sodium sulfite and the like; (2) oil-soluble antioxidants, such as ascorbyl palmitate, butylated hydroxyanisole (BHA), butylated hydroxytoluene (BHT), lecithin, propyl gallate, alpha-tocopherol, and the like; and (3) metal chelating agents, such as citric acid, ethylenediamine tetraacetic acid (EDTA), sorbitol, tartaric acid, phosphoric acid, and the like.

[0361] Further guidance regarding formulations that are suitable for various types of administration can be found in Remington's Pharmaceutical Sciences, Mace Publishing Company, Philadelphia, Pa., 17th ed. (1985). For a brief review of methods for drug delivery, see, Langer, Science 249:1527-1533 (1990).

[0362] In some embodiments, the present disclosure provides kits for carrying out a method described herein. In some embodiments, a kit can include:

[0363] (a) two or more nucleic acid molecules capable of reducing the expression or modifying the function of a gene product encoded by two or more endogenous target genes selected from SOCS1, PTPN2, and ZC3H12A;

[0364] (b) one or more polynucleotides encoding two or more nucleic acid molecules that are capable of reducing the expression or modifying the function of a gene product encoded by two or more endogenous target genes selected from SOCS1, PTPN2, and ZC3H12A;

[0365] (c) two or more proteins capable of reducing the expression or modifying the function of a gene product encoded by two or more endogenous target genes selected from SOCS1, PTPN2, and ZC3H12A;

[0366] (d) one or more polynucleotides encoding two or more modifying proteins that is capable of reducing the expression or modifying the function of a gene product encoded by two or more endogenous target genes selected from SOCS1, PTPN2, and ZC3H12A;

[0367] (e) two or more gRNAs capable of binding to a target DNA sequence in two or more endogenous target genes selected from SOCS1, PTPN2, and ZC3H12A;

[0368] (f) one or more polynucleotides encoding two or more gRNAs capable of binding to a target DNA sequence in two or more endogenous target genes selected from SOCS1, PTPN2, and ZC3H12A;

[0369] (g) one or more site-directed modifying polypeptides capable of interacting with a gRNA and modifying a target DNA sequence in an endogenous gene;

[0370] (h) one or more polynucleotides encoding a site-directed modifying polypeptide capable of interacting with a gRNA and modifying a target DNA sequence in two or more endogenous target genes selected from SOCS1, PTPN2, and ZC3H12A;

[0371] (i) two or more guide DNAs (gDNAs) capable of binding to a target DNA sequence in two or more endogenous target genes selected from SOCS1, PTPN2, and ZC3H12A;

[0372] (j) one or more polynucleotides encoding two or more gDNAs capable of binding to a target DNA sequence in two or more endogenous target genes selected from SOCS1, PTPN2, and ZC3H12A;

[0373] (k) one or more site-directed modifying polypeptides capable of interacting with a gDNA and modifying a target DNA sequence in an endogenous gene;

[0374] (l) one or more polynucleotides encoding a site-directed modifying polypeptide capable of interacting with a gDNA and modifying a target DNA sequence in an endogenous gene;

[0375] (m) two or more gRNAs capable of binding to a target mRNA sequence encoded by two or more endogenous target genes selected from SOCS1, PTPN2, and ZC3H12A;

[0376] (n) one or more polynucleotides encoding two or more gRNAs capable of binding to a target mRNA sequence encoded by two or more endogenous target genes selected from SOCS1, PTPN2, and ZC3H12A;

[0377] (o) one or more site-directed modifying polypeptides capable of interacting with a gRNA and modifying a target mRNA sequence encoded by an endogenous gene;

[0378] (p) one or more polynucleotides encoding a site-directed modifying polypeptide capable of interacting with a gRNA and modifying a target mRNA sequence encoded by an endogenous gene;

[0379] (q) a modified immune effector cell described herein; or

[0380] (r) any combination of the above.

[0381] In some embodiments, the kits described herein further comprise one or more immune checkpoint inhibitors. Several immune checkpoint inhibitors are known in the art and have received FDA approval for the treatment of one or more cancers. For example, FDA-approved PD-L1 inhibitors include Atezolizumab (Tecentriq®, Genentech), Avelumab (Bavencio®, Pfizer), and Durvalumab (Imfinzi®, AstraZeneca); FDA-approved PD-1 inhibitors include Pembrolizumab (Keytruda®, Merck) and Nivolumab (Opdivo®, Bristol-Myers Squibb); and FDA-approved CTLA4 inhibitors include Ipilimumab (Yervoy®, Bristol-Myers Squibb). Additional inhibitory immune checkpoint molecules that may be the target of future therapeutics include A2AR, B7-H3, B7-H4, BTLA, IDO, LAG3 (e.g., BMS-986016, under development by BSM), KIR (e.g., Lirilumab, under development by BSM), TIM3, TIGIT, and VISTA.

[0382] In some embodiments, the kits described herein comprise one or more components of a gene-regulating system (or one or more polynucleotides encoding the one or more components) and one or more immune checkpoint inhibitors known in the art (e.g., a PD1 inhibitor, a CTLA4 inhibitor, a PDL1 inhibitor, etc.). In some embodiments, the kits described herein comprise one or more components of a gene-regulating system (or one or more polynucleotides encoding the one or more components) and an anti-PD1 antibody (e.g., Pembrolizumab or Nivolumab). In some embodiments, the kits described herein comprise a modified immune effector cell described herein (or population thereof) and one or more immune checkpoint inhibitors known in the art (e.g., a PD1 inhibitor, a CTLA4 inhibitor, a PDL1 inhibitor, etc.). In some embodiments, the kits described herein comprise a modified immune effector cell described herein (or population thereof) and an anti-PD1 antibody (e.g., Pembrolizumab or Nivolumab).

[0383] In some embodiments, the kit comprises one or more components of a gene-regulating system (or one or more polynucleotides encoding the one or more components) and a reagent for reconstituting and/or diluting the components. In some embodiments, a kit comprising one or more components of a gene-regulating system (or one or more polynucleotides encoding the one or more components) and further comprises one or more additional reagents, where such additional reagents can be selected from: a buffer for introducing the gene-regulating system into a cell; a wash buffer; a control reagent; a control expression vector or RNA polynucleotide; a reagent for in vitro production of the gene-regulating system from DNA, and the like. Components of a kit can be in separate containers or can be combined in a single container.

[0384] In addition to above-mentioned components, in some embodiments a kit further comprises instructions for using the components of the kit to practice the methods of the present disclosure. The instructions for practicing the methods are generally recorded on a suitable recording medium. For example, the instructions may be printed on a substrate, such as paper or plastic, etc. As such, the instructions may be present in the kits as a package insert or in the labeling of the container of the kit or components thereof (i.e., associated with the packaging or sub-packaging). In other embodiments, the instructions are present as an electronic storage data file present on a suitable computer readable storage medium, e.g. CD-ROM, diskette, flash drive, etc. In yet other embodiments, the actual instructions are not present in the kit, but means for obtaining the instructions from a remote source, e.g. via the internet, are provided. An example of this embodiment is a kit that includes a web address where the instructions can be viewed and/or from which the instructions can be downloaded. As with the instructions, this means for obtaining the instructions is recorded on a suitable substrate.

### VI. Therapeutic Methods and Applications

[0385] In some embodiments, the modified immune effector cells and gene-regulating systems described herein may be used in a variety of therapeutic applications. For example, in some embodiments the modified immune effector cells and/or gene-regulating systems described herein may be administered to a subject for purposes such as gene therapy, e.g. to treat a disease, for use as an antiviral, for use as an anti-pathogenic, for use as an anti-cancer therapeutic, or for biological research.

[0386] In some embodiments, the subject may be a neonate, a juvenile, or an adult. Of particular interest are mammalian subjects. Mammalian species that may be treated with the present methods include canines and felines; equines; bovines; ovines; etc. and primates, particularly humans. Animal models, particularly small mammals (e.g. mice, rats, guinea pigs, hamsters, rabbits, etc.) may be used for experimental investigations.

[0387] Administration of the modified immune effector cells described herein, populations thereof, and compositions thereof can occur by injection, irrigation, inhalation, consumption, electro-osmosis, hemodialysis, iontophoresis, and other methods known in the art. In some embodiments, administration route is local or systemic. In some embodiments administration route is intraarterial, intracranial, intradermal, intraduodenal, intrammamary, intrameningeal, intraperitoneal, intrathecal, intratumoral, intravenous, intravitreal, ophthalmic, parenteral, spinal, subcutaneous, ureteral, urethral, vaginal, or intrauterine.

[0388] In some embodiments, the administration route is by infusion (e.g., continuous or bolus). Examples of methods for local administration, that is, delivery to the site of injury or disease, include through an Ommaya reservoir, e.g. for intrathecal delivery (See e.g., U.S. Pat. Nos. 5,222,982 and 5,385,582, incorporated herein by reference); by bolus injection, e.g. by a syringe, e.g. into a joint; by continuous infusion, e.g. by cannulation, such as with convection (See e.g., US Patent Application Publication No. 2007-0254842, incorporated herein by reference); or by implanting a device upon which the cells have been reversibly affixed (see e.g. US Patent Application Publication Nos. 2008-0081064 and 2009-0196903, incorporated herein by reference). In some embodiments, the administration route is by topical administration or direct injection. In some embodiments, the modified immune effector cells described herein may be provided to the subject alone or with a suitable substrate or matrix, e.g. to support their growth and/or organization in the tissue to which they are being transplanted.

[0389] In some embodiments, at least 1×10³ cells are administered to a subject. In some embodiments, at least 5×10³ cells, 1×10⁴ cells, 5×10⁴ cells, 1×10⁵ cells, 5×10⁵ cells, 1×10⁶, 2×10⁶, 3×10⁶, 4×10⁶, 5×10⁶, 1×10⁷, 1×10⁸, 5×10⁸, 1×10⁹, 5×10⁹, 1×10¹⁰, 5×10¹⁰, 1×10¹¹, 5×10¹¹, 1×10¹², 5×10¹², or more cells are administered to a subject. In some embodiments, between about 1×10⁷ and about 1×10¹² cells are administered to a subject. In some embodiments, between about 1×10⁸ and about 1×10¹² cells are administered to a subject. In some embodiments, between about 1×10⁹ and about 1×10¹² cells are administered to a subject. In some embodiments, between about 1×10¹⁰ and about 1×10¹² cells are administered to a subject. In some embodiments, between about 1×10¹¹ and about 1×10¹² cells are administered to a subject. In some embodiments, between about 1×10⁷ and about 1×10¹¹ cells are administered to a subject. In some embodiments, between about 1×10⁷ and about 1×10¹⁰ cells are administered to a subject. In some embodiments, between about 1×10⁷ and about 1×10⁹ cells are administered to a subject. In some embodiments, between about 1×10⁷ and about 1×10⁸ cells are administered to a subject. The number of administrations of treatment to a subject may vary. In some embodiments, introducing the modified immune effector cells into the subject may be a one-time event. In some embodiments, such treatment may require an on-going series of repeated treatments. In some embodiments, multiple administrations of the modified immune effector cells may be required before an effect is observed. The exact protocols depend upon the disease or condition, the stage of the disease and parameters of the individual subject being treated.

[0390] In some embodiments, the gene-regulating systems described herein are employed to modify cellular DNA or RNA in vivo, such as for gene therapy or for biological research. In such embodiments, a gene-regulating system may be administered directly to the subject, such as by the methods described supra. In some embodiments, the gene-regulating systems described herein are employed for the ex vivo or in vitro modification of a population of immune effector cells. In such embodiments, the gene-regulating systems described herein are administered to a sample comprising immune effector cells.

[0391] In some embodiments, the modified immune effector cells described herein are administered to a subject. In some embodiments, the modified immune effector cells described herein administered to a subject are autologous immune effector cells. The term “autologous” in this context refers to cells that have been derived from the same subject to which they are administered. For example, immune effector cells may be obtained from a subject, modified ex vivo according to the methods described herein, and then administered to the same subject in order to treat a disease. In such embodiments, the cells administered to the subject are autologous immune effector cells. In some embodiments, the modified immune effector cells, or compositions thereof, administered to a subject are allogenic immune effector cells. The term “allogenic” in this context refers to cells that have been derived from one subject and are administered to another subject. For example, immune effector cells may be obtained from a first subject, modified ex vivo according to the methods described herein and then administered to a second subject in order to treat a disease. In such embodiments, the cells administered to the subject are allogenic immune effector cells.

[0392] In some embodiments, the modified immune effector cells described herein are administered to a subject in order to treat a disease. In some embodiments, treatment comprises delivering an effective amount of a population of cells (e.g., a population of modified immune effector cells) or composition thereof to a subject in need thereof. In some embodiments, treating refers to the treatment of a disease in a mammal, e.g., in a human, including (a) inhibiting the disease, i.e., arresting disease development or preventing disease progression; (b) relieving the disease, i.e., causing regression of the disease state or relieving one or more symptoms of the disease; and (c) curing the disease, i.e., remission of one or more disease symptoms. In some embodiments, treatment may refer to a short-term (e.g., temporary and/or acute) and/or a long-term (e.g., sustained) reduction in one or more disease symptoms. In some embodiments, treatment results in an improvement or remediation of the symptoms of the disease. The improvement is an observable or measurable improvement, or may be an improvement in the general feeling of well-being of the subject.

[0393] The effective amount of a modified immune effector cell administered to a particular subject will depend on a variety of factors, several of which will differ from patient to patient including the disorder being treated and the severity of the disorder; activity of the specific agent(s) employed; the age, body weight, general health, sex and diet of the patient; the timing of administration, route of administration; the duration of the treatment; drugs used in combination; the judgment of the prescribing physician; and like factors known in the medical arts.

[0394] In some embodiments, the effective amount of a modified immune effector cell may be the number of cells required to result in at least 1, 2, 3, 4, 5, 6, 7, 8, 9, 10, 20, 30, 40, 50, 60, 70, 80, 90, 100, or more fold decrease in tumor mass or volume, decrease in the number of tumor cells, or decrease in the number of metastases. In some embodiments, the effective amount of a modified immune effector cell may be the number of cells required to achieve an increase in life expectancy, an increase in progression-free or disease-free survival, or amelioration of various physiological symptoms associated with the disease being treated. In some embodiments, an effective amount of modified immune effector cells will be at least 1×10³, for example 5×10³, 1×10⁴, 5×10⁴, 1×10⁵, 5×10⁵, 1×10⁶, 2×10⁶, 3×10⁶, 4×10⁶, 5×10⁶, 1×10⁷, 1×10⁸, 5×10⁸, 1×10⁹, 5×10⁹, 1×10¹⁰, 5×10¹⁰, 1×10¹¹, 5×10¹¹, 1×10¹², 5×10¹², or more cells.

[0395] In some embodiments, the modified immune effector cells and gene-regulating systems described herein may be used in the treatment of a cell-proliferative disorder, such as a cancer. Cancers that may be treated using the compositions and methods disclosed herein include cancers of the blood and solid tumors. For example, cancers that may be treated using the compositions and methods disclosed herein include, but are not limited to, adenoma, carcinoma, sarcoma, leukemia or lymphoma. In some embodiments, the cancer is chronic lymphocytic leukemia (CLL), B cell acute lymphocytic leukemia (B-ALL), acute lymphoblastic leukemia (ALL), acute myeloid leukemia (AML), non-Hodgkin's lymphoma (NHL), diffuse large cell lymphoma (DLCL), diffuse large B cell lymphoma (DLBCL), Hodgkin's lymphoma, multiple myeloma, renal cell carcinoma (RCC), neuroblastoma, colorectal cancer, breast cancer, ovarian cancer, melanoma, sarcoma, prostate cancer, lung cancer including but not limited to NSCLC esophageal cancer, hepatocellular carcinoma, pancreatic cancer, astrocytoma, mesothelioma, head and neck cancer, medulloblastoma, bladder cancer, and liver cancer.

[0396] As described above, several immune checkpoint inhibitors are currently approved for use in a variety of oncologic indications (e.g., CTLA4 inhibitors, PD1 inhibitors, PDL1 inhibitors, etc.). In some embodiments, administration of a modified immune effector cell comprising reduced expression and/or function of an endogenous target gene described herein results in an enhanced therapeutic effect (e.g., a more significant reduction in tumor growth, an increase in tumor infiltration by lymphocytes, an increase in the length of progression free survival, etc.) than is observed after treatment with an immune checkpoint inhibitor.

[0397] Further, some oncologic indications are non-responsive (i.e., are insensitive) to treatment with immune checkpoint inhibitors. Further still, some oncologic indications that are initially responsive (i.e., sensitive) to treatment with immune checkpoint inhibitors develop an inhibitor-resistant phenotype during the course of treatment. Therefore, in some embodiments, the modified immune effector cells described herein, or compositions thereof, are administered to treat a cancer that is resistant (or partially resistant) or insensitive (or partially insensitive) to treatment with one or more immune checkpoint inhibitors. In some embodiments, administration of the modified immune effector cells or compositions thereof to a subject suffering from a cancer that is resistant (or partially resistant) or insensitive (or partially insensitive) to treatment with one or more immune checkpoint inhibitors results in treatment of the cancer (e.g., reduction in tumor growth, an increase in the length of progression free survival, etc.). In some embodiments, the cancer is resistant (or partially resistant) or insensitive (or partially insensitive) to treatment with a PD1 inhibitor.

[0398] In some embodiments, the modified immune effector cells or compositions thereof are administered in combination with an immune checkpoint inhibitor. In some embodiments, administration of the modified immune effector cells in combination with the immune checkpoint inhibitor results in an enhanced therapeutic effect in a cancer that is resistant, refractory, or insensitive to treatment by an immune checkpoint inhibitor than is observed by treatment with either the modified immune effector cells or the immune checkpoint inhibitor alone. In some embodiments, administration of the modified immune effector cells in combination with the immune checkpoint inhibitor results in an enhanced therapeutic effect in a cancer that is partially resistant, partially refractory, or partially insensitive to treatment by an immune checkpoint inhibitor than is observed by treatment with either the modified immune effector cells or the immune checkpoint inhibitor alone. In some embodiments, the cancer is resistant (or partially resistant), refractory (or partially refractory), or insensitive (or partially insensitive) to treatment with a PD1 inhibitor.

[0399] In some embodiments, administration of a modified immune effector cell described herein or composition thereof in combination with an anti-PD1 antibody results in an enhanced therapeutic effect in a cancer that is resistant or insensitive to treatment by the anti-PD1 antibody alone. In some embodiments, administration of a modified immune effector cell described herein or composition thereof in combination with an anti-PD1 antibody results in an enhanced therapeutic effect in a cancer that is partially resistant or partially insensitive to treatment by the anti-PD1 antibody alone.

[0400] Cancers that demonstrate resistance or sensitivity to immune checkpoint inhibition are known in the art and can be tested in a variety of in vivo and in vitro models. For example, some melanomas are sensitive to treatment with an immune checkpoint inhibitor such as an anti-PD1 antibody and can be modeled in an in vivo B16-Ova tumor model (See Example 5). Further, some colorectal cancers are known to be resistant to treatment with an immune checkpoint inhibitor such as an anti-PD1 antibody and can be modeled in a PMEL/MC38-gp100 model (See Example 5). Further still, some lymphomas are known to be insensitive to treatment with an immune checkpoint inhibitor such as an anti-PD1 antibody and can be modeled in various models by adoptive transfer or subcutaneous administration of lymphoma cell lines, such as Raji cells (See Example 6-9).

[0401] Current adoptive cell therapy, including TIL therapy, includes lymphodepletion 7 days prior to TIL infusion using Cy/Flu based treatment. The lymphodepletion is believed necessary to deplete the endogenous Treg population, to boost endogenous IL-7 and IL-15 production and to create physical space for the TIL infusion. This lymphodepletion is associated with severe grade 3, 4, and sometimes 5 adverse events and can significantly impact patient outcome. In addition, current therapy includes an infusion of high dose IL-2 5 days prior to TIL infusion in order to boost function and survival of the transferred TILs. However, the high dose IL-2 infusion is associated with severe grade 3 and 4 adverse events, including capillary leak syndrome. In some embodiments, the modified immune effector cells described herein are transferred to a recipient host that has not undergone lymphodepletion treatment and/or are transferred to a recipient host in the absence of high dose IL-2 treatment. Without wishing to be bound by theory, it is possible that the modified immune effector cells described herein (e.g., modified TILs) demonstrate increased sensitivity to IL-7, IL-15 and/or IL-2, therefore allowing for increased steps enhanced competitive fitness, survival, and/or persistence of the modified cells such that lymphodepletion and/or high dose IL-2 is not required.

[0402] In some embodiments, the modified immune effector cells and gene-regulating systems described herein may be used in the treatment of a viral infection. In some embodiments, the virus is selected from one of adenoviruses, herpesviruses (including, for example, herpes simplex virus and Epstein Barr virus, and herpes zoster virus), poxviruses, papovaviruses, hepatitis viruses, (including, for example, hepatitis B virus and hepatitis C virus), papilloma viruses, orthomyxoviruses (including, for example, influenza A, influenza B, and influenza C), paramyxoviruses, coronaviruses, picornaviruses, reoviruses, togaviruses, flaviviruses, bunyaviridae, rhabdoviruses, rotavirus, respiratory syncitial virus, human immunodeficiency virus, or retroviruses.

### EXAMPLES

### Example 1: Materials and Methods

[0403] The experiments described herein utilize the CRISPR/Cas9 system to reduce expression of two or more of SOCS1, PTPN2, and ZC3H12A in different T cell populations.

[0404] gRNA-Cas9 RNPs:

[0405] Unless otherwise indicated, the following experiments use dual gRNA molecules formed by duplexing 200 μM tracrRNA (IDT Cat #1072534) with 200 μM of target-specific crRNA (IDT) in nuclease free duplex buffer (IDT Cat #11-01-03-01) for 5 min at 95° C., to form 100 μM of tracrRNA:crRNA duplex, where the tracrRNA and crRNA are present at a 1:1 ratio. Alternatively, single-molecule gRNAs (sgRNAs) (IDT) were resuspended at 100 μM in nuclease free duplex buffer (IDT). Cas9 was expressed in target cells by introduction of either Cas9 mRNA or a Cas9 protein. Unless otherwise indicated, the Cas9 protein derived from S. pyogenes (IDT Cat #1074182) was used in the following experiments. For Human RNPs, gRNA-Cas9 ribonucleoproteins (RNPs) were formed by combining 1.2 μL of 100 μM tracrRNA:crRNA duplex or gRNAs with 1 μL of 20 μM Cas9 protein and 0.8 μL of PBS. For Mouse RNPs, gRNA-Cas9 ribonucleoproteins (RNPs) were formed by combining 1 Volume of 44 μM tracrRNA:crRNA duplex or gRNA with 1 Volume of 36 μM Cas9 in Invitrogen Buffer T. For both, mixtures were incubated at RT for 20 minutes to form the RNP complexes. gRNAs used in the following experiments are provided in Table 18 below.

TABLE 18

| Target Gene | Guide ID | Sequence | SEQ ID |
|---|---|---|---|
| Pccd1 | Nm.Pdcd1 | CGGAGGATCTTATGCTGAAC | 270 |
| Cb1b | Nm.Cb1b | CCTTATCTTCAGTCACATGC | 271 |
| Zc3h12a | Nm.Zc3h12a | TTCCCTCCTCTGCCAGCCAT | 211 |
| Socs1 | Nm.Socs1 | GCCGGCCGCTTCCACTTGGA | 9 |
| Ptpn2 | Nm.Ptpn2 | CCTTTCTTGCAGATGGAAAA | 202 |

[0406] CAR Expression Constructs:

[0407] A Chimeric antigen receptor (CAR) specific for human CD19, was generated. Briefly, the 22 amino acid signal peptide of the human granulocyte-macrophage colony stimulating factor receptor subunit alpha (GMSCF-Rα) was fused to an antigen-specific scFv domain specifically binding to CD19 (clone FMC63). The human CD8α stalk was used as a transmembrane domain. The intracellular signaling domains of the CD3ξ chain were fused to the cytoplasmic end of the CD8α stalk. The full length CAR construct is provided in SEQ ID NO: 813 and nucleic acid sequences of the full length CAR constructs is provided in SEQ ID NO: 814.

[0408] Engineered TCRs Expression Constructs:

[0409] A recombinant T cell receptor (TCR) specific for the NY-ESO-1 peptide (in the context of HLA-A*02:01) was generated. Paired TCR-α:TCR-β variable region protein sequences encoding the 1G4 TCR specific for the NY-ESO-1 peptide comprising the sequence of SLLMWITQ (SEQ ID NO: 815), presented by HLA-A*02:01, were identified from the literature (Robbins et al, Journal of Immunology 2008 180:6116-6131). The NY-ESO-1 peptide can have an additional cysteine or valine at its C-terminal end. TCRα chains were composed of V and J gene segments and CDR3α sequences and TCRβ chains were composed of V, D, and J gene segment and CDR3-β sequences. The native TRAC (SEQ ID NO: 816) and TRBC (SEQ ID NOs: 817) protein sequences were fused to the C-terminal ends of the α and β chain variable regions, respectively, to produce 95:LY 1G4-TCR α/βchains (SEQ ID NOs: 818 and 819, respectively.

[0410] Codon-optimized DNA sequences encoding the engineered TCRα and TCRβ chain proteins were generated where the P2A sequence (SEQ ID NO: 820) was inserted between the DNA sequences encoding the TCRβ and the TCRα chain, such that expression of both TCR chains was driven off of a single promoter in a stoichiometric fashion. The expression cassettes encoding the engineered TCR chains therefore comprised the following format: TCRβ-P2A-TCRα. Final protein sequences for each TCR construct are provided in SEQ ID NO: 821 (95:LY 1G4). This TCR construct is referred to hereafter as “TCR2”.

[0411] Lentiviral Expression Constructs:

[0412] The CAR and engineered TCR expression constructs described above were then inserted into a plasmid comprising an SFFV promoter driving expression of the engineered receptor, a T2A sequence, and a puromycin resistance cassette. Lentiviral constructs comprising an engineered CAR expression construct may further comprise an sgRNA targeting the endogenous TRAC gene, which encodes the constant region of the α chain of the T cell receptor.

[0413] Lentiviruses encoding the engineered receptors described above were generated as follows. Briefly, 289×10⁶ of LentiX-293T cells were plated out in a 5-layer CellSTACK 24 hours prior to transfection. Serum-free OptiMEM and TransIT-293 were combined and incubated for 5 minutes before combining helper plasmids (58 μg VSVG and 115 μg PAX2-Gag-Pol) with 231 μg of an engineered receptor- and sgRNA-expressing plasmid described above. After 20 minutes, this mixture was added to the LentiX-293T cells with fresh media. Media was replaced 18 hours after transfection and viral supernatants were collected 48 hours post-transfection. Supernatants were treated with Benzonase® nuclease and passed through a 0.45 μm filter to isolate the viral particles. Virus particles were then concentrated by Tangential Flow Filtration (TFF), aliquoted, tittered, and stored at −80° C.

[0414] Human T cell Isolation and Activation:

[0415] Total human PBMCs were isolated from fresh leukopheresis by Ficoll gradient centrifugation. CD8+ T-cells were then purified from total PBMCs using a CD8+ T-cell isolation kit (Stemcell Technologies Cat #17953). For T cell activation, CD8+ T cells were plated at 2×10⁶ cells/mL in X-VIVO 15 T Cell Expansion Medium (Lonza, Cat #04-418Q) in a T175 flask, with 6.25 μL/mL of ImmunoCult T-cell activators (anti-CD3/CD28/CD2, StemCell Technologies, Vancouver BC, Canada) and 10 ng/mL human IL2. T-cells were activated for 18 hours prior to transduction with lentiviral constructs.

[0416] Lentiviral transduction of T cells: T-cells activated 18 hours prior were seeded at 5×10⁶ cells per well in a 6 well plate, in 1.5 mL volume of X-VIVO 15 media, 10 ng/mL human IL-2 and 12.5 μL Immunocult Human CD3/CD28/CD2 T-cell Activator. Lentivirus expressing the engineered receptors was added at an MOI capable of infecting 80% of all cells. 25 μL of Retronectin (1 mg/mL) was added to each well. XVIVO-15 media was added to a final volume of 2.0 mL per well. Plates were spun at 600×g for 1.5 hours at room temperature. One day later, cells were washed and seeded at 1×10⁶ cells/mL in X-VIVO 15, 10 ng/mL IL2+ T-cell activators.

[0417] Electroporation of Human PBMC-Derived T Cells:

[0418] 3 days after T cell activation, T cells were harvested and resuspended in nucleofection buffer (18% supplement 1, 82% P3 buffer from the Amaxa P3 primary cell 4D-Nuclefector X kit S) at a concentration of 100×10⁶ cells/mL. 1.5 μL of sgRNA/Cas9 RNP complexes (containing 120 pmol of crRNA:tracrRNA duplex and 20 pmol of Cas9 nuclease) and 2.1 μL (100 pmol) of electroporation enhancer were added per 20 μL of cell solution. 25 μL of the cell/RNP/enhancer mixture was then added to each electroporation well. Cells were electroporated using the Lonza electroporator with the “EO-115” program. After electroporation, 80 μL of warm X-VIVO 15 media was added to each well and cells were pooled into a culture flask at a density of 2×10⁶ cells/mL in X-VIVO 15 media containing IL-2 (10 ng/mL). On Day 4, cells were washed, counted, and seeded at densities of 50-100×10⁶ cells/L in X-VIVO 15 media containing IL-2 (10 ng/mL) in G-Rex6M well plates or G-Rex100M, depending on the number of cells available. On Days 6 and 8, 10 ng/mL of fresh recombinant human IL-2 was added to the cultures.

[0419] Human TIL Isolation and Activation:

[0420] Tumor infiltrating lymphocytes can also be modified by the methods described herein. In such cases, tumors are surgically resected from human patients and diced with scalpel blades into 1 mm³ pieces, with a single piece of tumor placed into each well of a 24 plate. 2 mL of complete TIL media (RPMI+10% heat inactivated human male AB serum, 1 mM pyruvate, 20 μg/mL gentamycin, 1× glutamax) supplemented with 6000 U/mL of recombinant human IL-2 is added to each well of isolated TILs. 1 mL of media is removed from the well and replaced with fresh media and IL-2 up to 3 times a week as needed. As wells reach confluence, they are split 1:1 in new media+IL-2. After 4-5 weeks of culture, the cells are harvested for rapid expansion.

[0421] TIL Rapid Expansion:

[0422] TILs are rapidly expanded by activating 500,000 TILs with 26×10⁶ allogeneic, irradiated (5000 cGy) PBMC feeder cells in 20 mL TIL media+20 mL of Aim-V media (Invitrogen)+30 ng/mL OKT3 mAb. 48 hours later (Day 2), 6000 U/mL IL-2 is added to the cultures. On day 5, 20 mL of media is removed, and 20 mL fresh media (+30 ng/ml OKT3) is added. On Day 7, cells are counted, and reseeded at 60×10⁶ cells/L in G-Rex6M well plates (Wilson Wolf, Cat #80660M) or G-Rex100M (Wilson Wolf, Cat #81100S), depending on the number of cells available. 6000 U/mL fresh IL-2 is added on Day 9 and 3000 U/mL fresh IL-2 is added on Day 12. TILs are harvested on Day 14. Expanded cells are then slow-frozen in Cryostor CS-10 (Stemcell Technologies Cat #07930) using Coolcell Freezing containers (Corning) and stored long term in liquid nitrogen.

[0423] Mice:

[0424] Wild type CD8⁺ T cells were derived from C57BL/6J mice (The Jackson Laboratory, Bar Harbor Me.). Ovalbumin (Ova)-specific CD8⁺ T cells were derived from OT1 mice (C57BL/6-Tg(TcraTcrb) 1100Mjba; Jackson Laboratory). OT1 mice comprise a transgenic TCR that recognizes residues 257-264 of the ovalbumin (Ova) protein. gp100-specific CD8+ T cells were derived from PMEL mice (B6.Cg-Thy1<a>/CyTg(TcraTcrb) 8Rest/J; The Jackson Laboratory, Bar Harbor Me. Cat #005023). Mice constitutively expressing the Cas9 protein were obtain from Jackson labs (B6J.129(Cg)-Gt(ROSA)26Sortm1.1(CAG-cas9*,-EGFP)Fezha; The Jackson Laboratory, Bar Harbor Me. Strain #026179), TCR-transgenic mice constitutively expressing Cas9 were obtained by breeding of OT1 mice with Cas9 mice.

[0425] Murine T Cell Isolation and Activation:

[0426] Spleens from transgenic mice were harvested and reduced to a single cell suspension using the GentleMACS system, according to the manufacturer's recommendations. Purified CD8⁺ T cells were obtained using the EasySep Mouse CD8⁺ T Cell Isolation Kit (Catalog #19853). CD8 T cells were cultured at 1×10⁶ cells/mL in complete T cell media (RPMI+10% heat inactivated FBS, 20 mM HEPES, 100 U/mL Penicillin, 100 μg/mL Streptomycin, 50 μM Beta-Mercaptoethanol) supplemented with 2 ng/mL of Recombinant Mouse IL-2 (Biolegend Catalog #575406) and activated with anti-CD3/anti-CD28 beads (Dynabeads™ Mouse T-Activator CD3/CD28 for T-Cell Expansion and Activation Cat #11456D).

[0427] Electroporation of Mouse T Cells:

[0428] Murine T-cells activated 48 hours prior were harvested, activation beads were removed and cells were washed and resuspended in Neon nucleofection buffer T. Up to 20×10⁶ cells resuspended in 90 μL (for single edits) or 80 μL (for combination edits) Buffer T can be electroporated using one Neon™ 100-4, tip. 10 μL of each sgRNA/Cas9 RNP complexes and 20 μL of 10.8 μM electroporation enhancer were added per tip. The T cell/RNP/enhancer mixture was loaded into the Neon™ tips and cells were electroporated on the Neon Transfection System using a single pulse of 20 ms at 1700V. Immediately after electroporation, the cells were transferred into a culture flask at a density of 1.6×10⁶ cells/mL in warm complete T cell media supplemented with 2 ng/mL of Recombinant Mouse IL-2. Edited murine CD8 T cells were further cultured at 1×10⁶ cells/mL in complete T cell media supplemented with IL-2 for an additional 2 days. On Day 4, cells were harvested counted and resuspended in PBS for injection in vivo.

[0429] Generation and Editing of Murine TILs:

[0430] To generate TILs, donor CD45.1 Pep Boy mice (B6. SJL-Ptprc^{a} Pepc^{b}/BoyJ) were injected subcutaneously with 0.5×10⁶ B16-Ova cells. On Day 14 post-tumor cell inoculation, tumors were harvested to generate edited CD45.1 Tumor Infiltrating Lymphocytes (TILs) to infuse into the second cohort of mice. B16-OVA tumors (200-600 mm³) were harvested, diced and reduced to a single cell suspension using the GentleMACS system and mouse Tumor Dissociation Kit (Miltenyi Biotech Catalog #130-096-730), according to the manufacturer's recommendations. Tumor suspension were filtered over 70 μm cell strainers and TILs were enriched using CD4/CD8 (TIL) Microbeads (Miltenyi Biotech Catalog #130-116-480). Isolated TILs were cultured in 6 well plates at 1.5×10⁶ cells/mL in complete mTIL media (RPMI+10% heat inactivated FBS, 20 mM HEPES, 100 U/mL Penicillin, 100 μg/mL Streptomycin, 50 μM Beta-Mercaptoethanol) supplemented with 3000 U/mL of recombinant human IL-2 (Peprotech Catalog #200-02). On Day 3 cells were harvested, washed and resuspended in nucleofection buffer T and electroporated with RNPs using the Neon Transfection System. After electroporation, TILs were cultured in 6 well plates at 1.5×10⁶ cells/mL in complete mTIL media supplemented with 3000 U/mL of recombinant human IL-2. On Day 5 and 7, cells were resuspended in fresh complete mTIL media supplemented with 3000 U/mL of recombinant human IL-2 and plated in flasks at a density of 1×10⁶ cells/mL. On Day 8, cells were harvested counted and resuspended in PBS for injection in vivo.

### Example 2: Screen for Dual-Edit Combinations

[0431] A double sgRNA library was constructed in a retroviral backbone. The library consisted of two U6 promoters (one human and one mouse), each driving expression of a single guide RNA (guide+tracr, sgRNA). The guides were cloned as pools to provide random pairings between guides, such that every sgRNA would be paired with every other sgRNA. The final double guide library was transfected into Phoenix-Eco 293T cells to generate murine ecotropic retrovirus. TCR transgenic OT1 cells expressing Cas9 were infected with the sgRNA-expressing virus to edit the two loci targeted by each of the sgRNAs. The edited transgenic T-cells were then transferred into mice bearing >400 mm³ B16-Ova tumors allografts. After two weeks, the tumors were excised and digested into single cell suspension using Miltenyi Tumor Dissociation Kit. gDNA was extracted from the cell pellet using a Qiagen QIAmp DNA and blood kit and the retroviral inserts were recovered by PCR using primers corresponding to the retroviral backbone sequences. The resulting PCR product were then sequenced to identify the sgRNAs present in the tumors two weeks after transfer. The representation of guide pairs in the final isolated cell populations was compared to the initial plasmid population and the population of infected transgenic T-cells before injection into the mouse. The frequency of sgRNA pairs that improved T-cells fitness and/or tumor infiltration were expected to increase over time, while combinations that impaired fitness were expected to decrease over time. Table 19 below shows the median fold change of sgRNA frequency in the final cell population compared to the sgRNA frequency in the initial cell population transferred in vivo.

TABLE 19

| Mouse Gene 1 | Mouse Gene 2 | Avg(Tmedian.Ifoldch.all) |
|---|---|---|
| CBLB | ZAP70 | 0 |
| CBLB | LAG3 | 0.08 |
| CBLB | CBLB | 0.17 |
| CBLB | LICIT | 0.31 |
| CBLB | TGFBR1 | 0.15 |
| CBLB | CTLA4 | 0.21 |
| CBLB | PTPN2 | 1.48 |
| CBLB | TGFBR2 | 0.75 |
| CBLB | ZC3H12A | 8.9 |
| PDCD1 | ZAP70 | 0 |
| PDCD1 | LAG3 | 0.02 |
| PDCD1 | PDCD1 | 0.02 |
| PDCD1 | TIGIT | 0.02 |
| PDCD1 | TGFBR1 | 0.02 |
| PDCD1 | CTLA4 | 0.59 |
| PDCD1 | PTPN2 | 0.07 |
| PDCD1 | TGFBR2 | 0.07 |
| PDCD1 | ZC3H12A | 1.33 |
| PTPN2 | ZAP70 | 0 |
| PTPN2 | LAG3 | 0.09 |
| PTPN2 | PTPN2 | 0.04 |
| PTPN2 | TIGIT | 0.38 |
| PTPN2 | TGFBR1 | 0.22 |
| PTPN2 | CTLA4 | 0.03 |
| PTPN2 | TGFBR2 | 0.23 |
| PTPN2 | ZC3H12A | 9.4 |
| TGFBR1 | ZAP70 | 0 |
| TGFBR1 | LAG3 | 0 |
| TGFBR1 | TIGIT | 0.03 |
| TGFBR1 | TGFBR1 | 0.06 |
| TGFBR1 | CTLA4 | 0.01 |
| TGFBR1 | TGFBR2 | 0.07 |
| TGFBR1 | ZC3H12A | 3.33 |
| ZC3H12A | ZAP70 | 0.01 |
| ZC3H12A | LAG3 | 0.73 |
| ZC3H12A | TIGIT | 2.53 |
| ZC3H12A | CTLA4 | 0.61 |
| ZC3H12A | ZC3H12A | 1.14 |
| Havcr2 | Havcr2 | 0.02 |
| Havcr2 | LAG3 | 0.01 |
| Havcr2 | Olfr1389 | 0 |
| Havcr2 | Olfr453 | 0.01 |
| Havcr2 | PDCD1 | 0.02 |
| LAG3 | Olfr1389 | 0 |
| LAG3 | Olfr453 | 0.02 |
| LAG3 | PDCD1 | 0.02 |
| Olfr1389 | Olfr1389 | 0.01 |
| Olfr1389 | Olfr453 | 0 |
| Olfr1389 | PDCD1 | 0.02 |
| Olfr1389 | PTPN2 | 0.03 |
| Olfr1389 | ZC3H12A | 0.78 |
| Olfr453 | Olfr453 | 0.01 |
| Olfr453 | PDCD1 | 0.01 |
| Olfr453 | PTPN2 | 0.46 |
| Olfr453 | ZC3H12A | 1.58 |

### Example 3: Efficacy of Ptpn2/Socs1 Dual-Edited Transgenic T Cells in Murine Syngeneic Tumor Models

[0432] OT1 T cell and B16-Ova Tumor Cell Model: Anti-tumor efficacy of dual-edited Ptpn2/Socs1 CD8+ T cells was evaluated in mice using the B16Ova subcutaneous syngeneic tumor model. 6-8 week old female C57BL/6J mice from Jackson labs were injected subcutaneously in the right flank with 0.5×10⁶ B16-Ova tumor cells. When tumors in the entire cohort of mice reached an average volume of approximately 485 mm³ at 15 days after inoculation, the mice were randomized into five groups of 10 mice each and injected intravenously with edited murine OT1 CD8+ T cells via tail vein injection. Prior to injection, these cells were edited by electroporation with gRNA/Cas9 RNP complexes comprising (1) a non-targeting control gRNA; (2) a single gRNA targeting the PD1 gene (SEQ ID NO: 270); (3) a single gRNA targeting the Ptpn2 gene (SEQ ID NO: 202); (4) a single gRNA targeting the Socs1 gene (SEQ ID NO: 9); (5) 2 gRNAs, one targeting each of the Socs1 and Ptpn2 genes. Editing efficiency of the gRNA/Cas9 complex targeting the Ptpn2 and Socs1 genes was assessed by next-generation sequencing and determined to be 70% and 82%, respectively. Body weight and tumor volume was measured at least twice per week. Tumor volume was calculated as mean and standard error of the mean for each treatment group. The percentage tumor growth inhibition (TGI) was calculated according to the following formula:

% TGI=(Ptpn2/Socs1 TV_{final}−Ptpn2/Socs1 TVᵢₙᵢₜᵢₐₗ)/(Control TV_{final} Control TVᵢₙᵢₜᵢₐₗ),
[0433] where TV=mean tumor volume, final=Day 7, and initial=day of edited mouse OT1 CD8+ T cell transfer.

[0434] The data in FIG. 1 show that compared to a control guide, adoptive transfer of Ptpn2/Socs1 dual-edited mouse OT1 CD8+ T cells resulted in an anti-tumor response in the B16Ova subcutaneous mouse model. Further, the % TGI observed on Day 7 after T cell transfer was increased in the Ptpn2/Socs1 dual-edited group (TGI=90%) compared to either of the Ptpn2-single edited (TGI=1%) or Socs1-single edited (TGI=44%) groups. Additionally, the % TGI of the Ptpn2/Socs1 dual-edited group was also increased compared to the % TGI observed with PD1-edited T cells (TGI=30%). A summary of the efficacy of dual-edited and single-edited T cells in the B16-Ova model is provided in Table 20 below.

TABLE 20

| | PD-1 sensitive | PD-1 resistant |
|---|---|---|
| | B16-Ova, normal* | B16-Ova, large** |
| Gene Target | (melanoma) | (melanoma) |
| Ptpn2 | ++ | − |
| Socs1 | ++ | − |
| Dual Ptpn2/Socs1 | +++ | +++ |
| Pdcd-1 | ++ | − |

*100 mm³
**>500 mm³
NT = not tested; (−) = no efficacy observed; (+) = modest responses in majority of animals; (++) = strong responses in majority of animals; (+++) = strong responses, including some complete responses, in all animals treated

[0435] Subsequent studies in the PD-1 resistant large tumor B16Ova model were performed as described above with initial starting tumor volumes of approximately 343 mm³ at 15 days after inoculation. Mice that completely rejected the original large B16Ova tumor were then rechallenged subcutaneously in the left flank with either 0.5×10⁶ B16-Ova tumor cells (n=6) or 0.3×10⁶ B16F10 tumor cells (n=6) on day 106 after T cell transfer. Editing efficiency of the gRNA/Cas9 complex targeting the Ptpn2 and Socs1 genes was assessed by next-generation sequencing and determined to be 75.4% and 86.5%, respectively. Body weight and tumor volume was measured at least twice per week. Tumor volume was calculated as described above. At various timepoints before and after rechallenge the mice were bled via tail stick and samples were analyzed via flow cytometry to track the OT1 CD8+ T cells and their phenotype in peripheral blood.

[0436] A separate cohort of mice was inoculated and euthanized on day six. Tumor, spleen and blood was analyzed via flow cytometry for total OT1 population, cytokine production and other target related readouts.

[0437] The data in FIG. 9A shows that adoptive transfer of Ptpn2/Socs1 dual-edited mouse OT1 CD8+ T cells resulted in eight out of eight mice achieving complete responses against the large B16OVA tumors. Mice treated with Ptpn2/Socs1 dual-edited mouse OT1 CD8+ T cells showed an increase in the number of OT1 cells in the B16Ova tumor on day six compared to single edited OT1 CD8 T cells (FIG. 9B) and also showed an increase in granzyme B production (FIG. 9C). FIG. 9D shows that all mice that previously had rejected a large B16Ova tumor were subsequently able to reject a second inoculation of B16Ova compared to naïve mice. Two out of six mice that previously had rejected a large B16Ova tumor were also able to completely reject a second inoculation with parental B16F10 that does not express neoantigen. Characterization of Ptpn2/Socs1 dual-edited mouse OT1 CD8+ T cells during the B16Ova rechallenge showed an expansion of these cells from a central memory phenotype to an effector phenotype eight days after B16Ova rechallenge. This was followed by a contraction back to a central memory phenotype (FIG. 9E).

[0438] PMEL T Cell and MC38-gp100 Tumor Cell Model:

[0439] Additional experiments are performed to assess the effect of Ptpn2/Socs1 dual-edited T cells in a MC38 subcutaneous syngeneic tumor model of colorectal cancer (which is insensitive to treatment with anti-PD1 antibodies). Briefly, 6-8 week old female C57BL/6J mice from Jackson labs are injected subcutaneously with 1×10⁶ MC38 tumor cells expressing gp100. When tumors reached a volume of approximately 100 mm³, mice are randomized into groups of 10 and injected intravenously with edited murine PMEL CD8⁺ T cells via tail vein. Prior to injection, these cells are edited by electroporation with gRNA/Cas9 RNP complexes comprising (1) a non-targeting control gRNA; (2) a single gRNA targeting the PD1 gene; (3) a single gRNA targeting the Ptpn2 gene; (4) a single gRNA targeting the Socs1 gene; (5) 2 gRNAs, one targeting each of the Socs1 and Ptpn2 genes. PMEL CD8⁺ T cells were edited according to the method described here in Example 4. The editing efficiency of the dual gRNA/Cas9 complex targeting the Socs1 and Ptpn2 genes was assessed using by NGS and was determined to be 65% and 47%, respectively. Body weight and tumor volume are measured at least twice per week. Tumor volume was calculated as mean and standard error of the mean for each treatment group and the % TGI for each group is calculated as described above. These experiments show an enhanced anti-tumor efficacy of Ptpn2/Socs1 dual-edited T cells compared to control or single-edited T cell treatment.

### Example 4: Efficacy of Ptpn2/Socs1 Dual-Edited Transgenic T Cells in a Murine Syngeneic Model of Metastatic Lung Cancer

[0440] Anti-tumor efficacy of Ptpn2/Socs1 dual-edited T cells was evaluated in mice using the aggressive metastatic B16-F10 syngeneic tumor model with disease manifesting as lung metastasis. Briefly, 6-8 week old female C57BL/6J mice from Jackson labs were injected intravenously with 0.5×10⁶ B16-F10 tumor cells. Prior to inoculation, mice were weighed and randomly assigned to treatment groups. 3 days post-tumor cell inoculation, mice were injected intravenously with edited mouse PMEL CD8+ T cells via tail vein. Prior to T cell injection, these cells were edited by electroporation with gRNA/Cas9 RNP complexes comprising (1) a non-targeting control gRNA; (2) a single gRNA targeting the Ptpn2 gene (SEQ ID NO: 202); (3) a single gRNA targeting the Socs1 gene (SEQ ID NO: 9); (4) 2 gRNAs, one targeting each of the Socs1 and Ptpn2 genes. The editing efficiency of the dual gRNA/Cas9 complex targeting the Socs1 and Ptpn2 genes was assessed using by NGS and was determined to be 65% and 47%, respectively. Body weight was monitored at least twice per week. At D15 post-tumor cell inoculation (D12 post-T cell transfer), lungs of each mouse were perfused and fixed with 10% para-formaldehyde. After overnight fixation, lungs were transferred to 70% EtOH for further preservation.

[0441] Tumor efficacy was evaluated by visually assessing the B16-F10 tumor burden which can be seen as black colonies of cancer cells on the lungs. Large numbers of metastatic colonies were observed in all lungs from the untreated group and from mice treated with control-edited PMEL CD8+ T cells, signifying significant disease progression in these groups. Partial efficacy was seen in mice treated with Socs1 single-edited cells with evidence of a partial reduction of metastatic burden, while Ptpn2 single-edited cells had a minimal efficacy. However, treatment with Ptpn2/Socs1 dual-edited cells resulted in strong anti-tumor efficacy with a near complete inhibition of tumor formation. A summary of the efficacy of dual-edited and single-edited T cells in the B16-F10 model is provided in Table 21 below.

TABLE 21

| Target Gene | PD-1 resistant - B16F10 (lung) |
|---|---|
| Ptpn2 | + |
| Socs1 | ++ |
| Dual Ptpn2/Socs1 | +++ |
| Pdcd1 | − |

(−) = no efficacy observed; (+) = modest responses in majority of animals; (++) = strong responses in majority of animals; (+++) = strong responses, including some complete responses, in all animals treated

### Example 5: Efficacy of Ptpn2/Socs1 Dual-Edited Transgenic T Cells in a Xenograft Model of Melanoma

[0442] Anti-tumor efficacy of Ptpn2/Socs1 dual-edited T cells is evaluated in mice using the A375 xenograft tumor model. Briefly, 6-8 week old NSG mice from Jackson labs are injected subcutaneously with 5×10⁶ A375 cells (expressing the NY-ESO-1 antigen). When tumors reach a volume of approximately 200 mm³, mice are randomized into groups of 8 and injected intravenously with up to 30×10⁶ edited cells, which were additionally lentivirally transduced to express TCR2, via tail vein. Prior to T cell injection, these cells are edited by electroporation with gRNA/Cas9 RNP complexes comprising (1) a non-targeting control gRNA; (2) a single gRNA targeting the PD1 gene; (3) a single gRNA targeting the Ptpn2 gene; (4) a single gRNA targeting the Socs1 gene; (5) 2 gRNAs, one targeting each of the Socs1 and Ptpn2 genes. Body weight and tumor volume are measured at least twice per week. Tumor volume is calculated as mean and standard error of the mean for each treatment group and % TGI will be calculated as described above. These data demonstrate that treatment with Ptpn2/Socs1 dual-edited T cells enhances anti-tumor efficacy in a NY-ESO-1tumor model compared to the anti-tumor efficacy observed after treatment with either Ptpn2-single edited or Socs1-single edited cells.

### Example 6: Efficacy of Ptpn2/Socs1 Dual-Edited Tumor Infiltrating Lymphocytes

[0443] Anti-tumor efficacy of Ptpn2/Socs1 dual-edited tumor infiltrating lymphocytes (TILs) was evaluated in an exploratory mouse model. Two mice cohorts were used in this experiment: a donor cohort of CD45.1 Pep Boy mice (B6. SJL-Ptprc^{a} Pepc^{b}/BoyJ) and a recipient cohort of CD45.2 C57BL/6J mice (Jackson labs), each comprised of 6-8 week old female mice.

[0444] To generate TILs, donor CD45.1 Pep Boy mice were injected subcutaneously with 0.5×10⁶ B16-Ova cells. On Day 14 post-tumor cell inoculation, tumors were harvested to generate edited CD45.1 Tumor Infiltrating Lymphocytes (TILs) to infuse into the second cohort of mice as described above in Example 1. These TIL cells were edited by electroporation of gRNA/Cas9 complexes comprise (1) a non-targeting control gRNA; (2) a single gRNA targeting the Ptpn2 gene; (3) a single gRNA targeting the Socs1 gene; or (4) 2 gRNAs, one targeting each of the Socs1 and Ptpn2 genes. The editing efficiency of the dual gRNA/Cas9 complex targeting the Socs1 and Ptpn2 genes was assessed using by NGS and was determined to be 77.8% and 87.6%, respectively. For details for Ptpn2++Socs1 editing see Example 10 and Example 15.

[0445] Recipient CD45.2 C57BL/6J mice were injected subcutaneously with 0.5×10⁶ B16-Ova tumor cells. When tumors reach a volume of approximately 100 mm³, mice were randomized into groups of 10 and injected intravenously with edited CD45.1 TILs via tail vein. In additional experiments, human IL-2 can be delivered simultaneously. Body weight and tumor volume were measured at least twice per week. Tumor volume was calculated as mean and standard error of the mean for each treatment group and the % TGI is calculated according to the following formula:

% TGI=(Ptpn2/Socs1 TV_{final})−Ptpn2/Socs1 TVᵢₙᵢₜᵢₐₗ)/(Control TV_{final}−Control TVᵢₙᵢₜᵢₐₗ),
[0446] where TV=mean tumor volume, final=Day 17, and initial=day of edited TIL transfer.

[0447] In this preliminary experiment using this exploratory model, treatment with Ptpn2/Socs1 dual edited TILs leads to enhanced tumor efficacy.

TABLE 22

| | Non-Lymphodepleted |
|---|---|
| Gene Target | mTIL model |
| Ptpn2 | − |
| Socs1 | − |
| Dual Ptpn2/Socs1 | − |
| Pdcd-1 | − |
| Dual ZC3H12A/Socs1 | +++ |

(−) = no efficacy observed; (+) = modest responses in majority of animals; (++) = strong responses in majority of animals; (+++) = strong responses, including some complete responses, in all animals treated

### Example 7: Efficacy of Zc3h12a/Socs1 Dual-Edited Transgenic T Cells in Murine Syngeneic Tumor Models

[0448] OT1 T cell and B16-Ova Tumor cell Model:

[0449] Anti-tumor efficacy of Zc3h12a/Socs1 dual-edited transgenic CD8+ T cells was evaluated in mice using the B16Ova subcutaneous syngeneic tumor model. 6-8 week old female C57BL/6J mice from Jackson labs were injected subcutaneously with 0.5×10⁶ B16-Ova tumor cells. When tumors in the entire cohort of mice reached an average volume of approximately 485 mm³, the mice were randomized into five groups of 10 mice each and injected intravenously with edited murine OT1 CD8+ T cells via tail vein injection. Prior to injection, these cells were edited by electroporation with gRNA/Cas9 RNP complexes comprising (1) a non-targeting control gRNA; (2) a single gRNA targeting the Zc3h12a gene (SEQ ID NO: 211); (3) a single gRNA targeting the Socs1 gene (SEQ ID NO: 9); or (4) 2 gRNAs, one targeting each of the Zc3h12a and Socs1 genes. The editing efficiency of the dual gRNA/Cas9 complex targeting the Zc3h12a and Socs1 genes was assessed by NGS and determined to be 86% and 84%, respectively. Body weight and tumor volume were measured at least twice per week. Tumor volume was calculated as mean and standard error of the mean for each treatment group. The percentage tumor growth inhibition (TGI) was calculated using the following formula:

% TGI=(Zc3h12a/Socs1 TV_{final})−Zc3h12a/Socs1 TVᵢₙᵢₜᵢₐₗ)/(Control TV_{final}−Control TVᵢₙᵢₜᵢₐₗ),
[0450] where TV=mean tumor volume, final=Day 10, and initial=day 0 of edited T cell transfer.

[0451] The data in FIG. 2 show that compared to a control guide, adoptive transfer of Zc3h12a/Socs1 dual-edited mouse OT1 CD8+ T cells resulted in an enhanced anti-tumor response in the B16Ova subcutaneous mouse model. This effect was maintained out to day 140 before the study was terminated.

[0452] PMEL T Cell and MC38-gp100 Tumor Cell Model:

[0453] Additional experiments are performed to assess the effect of Zc3h12a/Socs1 dual-edited T cells in a MC38 subcutaneous syngeneic tumor model of colorectal cancer (which is insensitive to treatment with anti-PD1 antibodies). Briefly, 6-8 week old female C57BL/6J mice from Jackson labs are injected subcutaneously with 1×10⁶ MC38 tumor cells expressing gp100. When tumors reach a volume of approximately 100 mm³, mice are randomized into groups of 10 and injected intravenously with edited murine PMEL CD8⁺ T cells via tail vein. Prior to injection, these cells are edited by electroporation with gRNA/Cas9 RNP complexes comprising (1) a non-targeting control gRNA; (2) a single gRNA targeting the PD1 gene; (3) a single gRNA targeting the Zc3h12a gene; (4) a single gRNA targeting the Socs1 gene; (5) 2 gRNAs, one targeting each of the Socs1 and Zc3h12a genes. Body weight and tumor volume will be measured at least twice per week. Tumor volume is calculated as mean and standard error of the mean for each treatment group and the % TGI for each group is calculated as described above. These experiments are expected to show an enhanced anti-tumor efficacy of Ptpn2/Socs1 dual-edited T cells compared to control or single-edited T cell treatment.

### Example 8: Efficacy of Zc3h/2a/Socs1 Dual-Edited Transgenic T Cells in a Murine Syngeneic Model of Metastatic Cancer

[0454] Anti-tumor efficacy of Zc3h12a/Socs1 dual-edited T cells are evaluated in mice using the aggressive metastatic B16-F10 syngeneic tumor model with disease manifesting as lung metastasis. Briefly, 6-8 week old female C57BL/6J mice from Jackson labs are injected intravenously with 0.5×10⁶ B16-F10 tumor cells. Prior to inoculation, mice are weighed and randomly assigned to treatment groups. 3 days post-tumor cell inoculation, mice are injected intravenously with edited mouse PMEL CD8+ T cells via tail vein. Prior to T cell injection, these cells are edited by electroporation with gRNA/Cas9 RNP complexes comprising (1) a non-targeting control gRNA; (2) a single gRNA targeting the Zc3h12a gene; (3) a single gRNA targeting the Socs1 gene; (4) 2 gRNAs, one targeting each of the Zc3h12a and Socs1 genes. The editing efficiency of the dual gRNA/Cas9 complex targeting the Zc3h12a and Socs1 genes is assessed using by NGS. Body weight is monitored at least twice per week. At D15 post-tumor cell inoculation (D12 post-T cell transfer), lungs of each mouse are perfused and fixed with 10% para-formaldehyde. After overnight fixation, lungs are transferred to 70% EtOH for further preservation. Tumor efficacy is evaluated by visually assessing the B16-F10 tumor burden which can be seen as black colonies of cancer cells on the lungs. These data are expected to show an enhanced anti-tumor efficacy of Zc3h12a/Socs1 dual-edited T cells compared to control or single-edited T cell treatment.

TABLE 23

| Target Gene | PD-1 resistant - B16F10 (lung) |
|---|---|
| Zc3h12a | +++ |
| Socs1 | ++ |
| Pdcd1 | − |

(−) = no efficacy observed; (+) = modest responses in majority of animals; (++) = strong responses in majority of animals; (+++) = strong responses, including some complete responses, in all animals treated

### Example 9: Efficacy of Zc3h12a/Socs1 Dual-Edited Transgenic T Cells in a Xenograft Model of Melanoma

[0455] Anti-tumor efficacy of Zc3h12a/Socs1 dual-edited T cells is evaluated in mice using the A375 xenograft tumor model. Briefly, 6-8 week old NSG mice from Jackson labs are injected subcutaneously with 5×10⁶ A375 cells (expressing the NY-ESO-1 antigen). When tumors reach a volume of approximately 400 mm³, mice are randomized into groups of 8 and injected intravenously with 30×10⁶ edited TCR2 cells via tail vein. Prior to T cell injection, these cells are edited by electroporation with gRNA/Cas9 RNP complexes comprising (1) a non-targeting control gRNA; (2) a single gRNA targeting the PD1 gene; (3) a single gRNA targeting the Zc3h12a gene; (4) a single gRNA targeting the Socs1 gene; (5) 2 gRNAs, one targeting each of the Socs1 and Zc3h12a genes. Body weight and tumor volume are measured at least twice per week. Tumor volume is calculated as mean and standard error of the mean for each treatment group and % TGI will be calculated as described above. These data demonstrate that treatment with Zc3h12a/Socs1 dual-edited T cells is expected to lead to enhanced anti-tumor efficacy in a NY-ESO-1 tumor model compared to the anti-tumor efficacy observed after treatment with either Zc3h12a-single edited or Socs1-single edited cells.

### Example 10: Efficacy of Zc3h12a/Socs1 Dual-Edited Tumor Infiltrating Lymphocytes

[0456] Anti-tumor efficacy of Zc3h12a/Socs1 dual-edited tumor infiltrating lymphocytes (TILs) was evaluated in non-lymphodepleted mice using the B16Ova subcutaneous syngeneic tumor model. Two mice cohorts were used in this experiment: a donor cohort of CD45.1 Pep Boy mice (B6. SJL-Ptprc^{a} Pepc^{b}/BoyJ) and a recipient cohort of CD45.2 C57BL/6J mice (Jackson labs), each comprised of 6-8 week old female mice.

[0457] To generate TILs, donor CD45.1 Pep Boy mice are injected subcutaneously with 0.5×10⁶ B16-Ova cells. On Day 14 post-tumor cell inoculation, tumors were harvested to generate edited CD45.1 Tumor Infiltrating Lymphocytes (TILs) to infuse into the second cohort of mice as described above in Example 1. These TIL cells were edited by electroporation of gRNA/Cas9 complexes comprise (1) a non-targeting control gRNA; (2) a single gRNA targeting the Zc3h12a gene (SEQ ID NO: 211); (3) a single gRNA targeting the Socs1 gene (SEQ ID NO: 9); or (4) 2 gRNAs, one targeting each of the Socs1 and Zc3h12a genes. The editing efficiency of the dual gRNA/Cas9 complex targeting the Zc3h12a and Socs1 genes was assessed using by NGS and was determined to be 82% and 84%, respectively.

[0458] Recipient CD45.2 C57BL/6J mice were injected subcutaneously with 0.5×10⁶ B16-Ova tumor cells. When tumors reached a volume of approximately 100 mm³ mice were randomized into groups of 10 and injected intravenously with edited CD45.1 TILs via tail vein. Body weight and tumor volume was measured at least twice per week. Tumor volume was calculated as mean and standard error of the mean for each treatment group and the % TGI is calculated according to the following formula:

% TGI=(Zc3h12a/Socs1 TV_{final})−Zc3h12a/Socs1 TVᵢₙᵢₜᵢₐₗ)/(Control TV_{final}−Control TVᵢₙᵢₜᵢₐₗ),
[0459] where TV=mean tumor volume, final=Day 17 and initial=day of edited TIL transfer.

[0460] The data in FIG. 3 show that compared to a control guide, adoptive transfer of Zc3h12a/Socs1 dual-edited mouse TILs resulted in an enhanced anti-tumor response in the B16Ova subcutaneous mouse model (TGI=97%) compared to treatment with either Zc3h12a single-edited TILs (TGI=47%) or Socs1 single-edited TILs (TGI=32%).

### Example 11: Efficacy of PD1/Lag3 Dual-Edited Transgenic T Cells in a B16-Ova Murine Tumor Model

[0461] Anti-tumor efficacy of PD-1/Lag3 dual-edited T cells was evaluated in mice using the B16Ova subcutaneous syngeneic tumor model. 6-8 week old female C57BL/6J mice from Jackson labs were injected subcutaneously with 0.5×10⁶ B16Ova tumor cells. When tumors in the entire cohort of mice reached an average volume of approximately 485 mm³, the mice were randomized into groups of 10 and injected intravenously with edited mouse OT1 CD8+ T cells via tail vein. Prior to injection these cells were edited by electroporation with gRNA/Cas9 RNP complexes comprising (1) a non-targeting control gRNA; (2) a single gRNA targeting the PD1 gene (SEQ ID NO: 270); (3) a single gRNA targeting the Lag3 gene; (4) 2 gRNAs, one targeting each of the PD1 and Lag3 genes. The editing efficiency of the dual gRNA/Cas9 complex targeting the Pdcd1 and Lag3 genes was assessed using by NGS and was determined to be 58.8% and 89.4%, respectively. Body weight and tumor volume was measured at least twice per week. Tumor volume was calculated as mean and standard error of the mean for each treatment group. The percentage tumor growth inhibition (TGI) was calculated using the following formula:

% TGI=(PD1/Lag3 TV_{final})−PD1/Lag3 TVᵢₙᵢₜᵢₐₗ)/(Control TV_{final}−Control TVᵢₙᵢₜᵢₐₗ),
[0462] where TV=mean tumor volume, final=Day 10 and initial=day of edited mouse OT1 CD8+ T cell transfer.

[0463] The data in FIG. 4 show adoptive transfer of PD-1 single-edited T cells resulted in a TGI of 70% and adoptive transfer of Lag3 single-edited T cells resulted in a TGI of 36%. Surprisingly, combination edits of PD1 and Lag3 did not result in enhanced tumor growth inhibition and demonstrated a TGI of 38%.

### Example 12: Validation of Dual-Edited CAR-T and TCR Transgenic T Cell Efficacy and Function

[0464] Experiments were performed to validate the effects of editing two of PTPN2, ZC3H12A, and/or SOCS1 on the anti-tumor efficacy of CAR T cells and T cells engineered to express an artificial TCR. The engineered T cells described in Table 24 were edited as described in Example 1 to reduce expression of PTPN2, ZC3H12A, and/or SOCS1. These edited T cells were then evaluated in subcutaneous xenograft models using the indicated cell type.

TABLE 24
Engineered Receptor Specificity and Target Cell Lines

| Receptor Specificity | Target Cell Line |
|---|---|
| CD19 | Raji, Daudi, NALM-6, NALM-16, RAMOS, JeKo1 |
| BCMA | Multiple Myeloma cell lines NCI-H929, |
| | U266-B1, and RPMI-8226 |
| NYESO | A375 |
| MART1 | SKMEL5, WM2664, IGR1 |
| HER2+ | BT474 |

[0465] Briefly, 6-8 week old female NSG mice from Jackson labs were injected subcutaneously with 1×10⁶ Raji cells. When tumors reached a volume of approximately 200 mm³, mice were randomized into groups of 8 and injected intravenously with 3×10⁶−10×10⁶ edited engineered CAR T cells targeting CD19 via tail vein. Prior to injection the adoptively transferred cells were edited with either a control gRNA or a gRNA targeting PTPN2, ZC3H12A, and/or SOCS1. Body weight and tumor volume were measured at least twice per week. Tumor volume was calculated as mean and standard error of the mean for each treatment group. The results of these experiments (Table 25) show enhanced anti-tumor efficacy of 10×10⁶ PTPN2^{-/-} and SOCS1^{-/-} dual edited engineered T cells or as compared to a control guide, measured by tumor volume and number of complete responses at the end of the study (eight out of eight for PTPN2^{-/-}/SOCS1^{-/-} CAR T cells vs one out of eight for control edited CAR T cells)

TABLE 25

| Target Gene | Raji - CD19 CAR T Model |
|---|---|
| PTPN2 + SOCS1 | +++ |
| Pdcd1 | − |

(−) = no efficacy observed; (+) = modest responses in majority of animals; (++) = strong responses in majority of animals; (+++) = strong responses, including some complete responses, in all animals treated

[0466] Additional experiments are performed to validate the effects of editing PTPN2, ZC3H12A, and/or SOCS1 on engineered T cell cytokine production. Briefly, the engineered T cells described in Table 25 above are generated from human T cells, and two or more of PTPN2, ZC3H12A, and SOCS1 are edited by electroporation using guide RNAs complexed to Cas9 in an RNP format. CAR-Ts are co-cultured with the corresponding cell line indicated in Table 22 in vitro at a 1:0, 0.3:1, 1:1, 3:1 and 10:1 ratio. After 24 hours, total cell counts of engineered T cells are determined, and supernatants saved for cytokine analyses. The results of these experiments are expected to show enhanced accumulation of and increased levels of cytokine production from dual-edited CAR T cells compared to control edited cells.

### Example 13: In Vitro Assessment of Dual-Edited Immune Cell Function

[0467] To assess for SOCS1-, PTPN2-, and ZC3H12A-dependent pharmacology, assays are developed that quantify the dependent biology of each target. These assays are also intended to be used to assess target-dependent pharmacology in double edited TILs. The activity of sgRNAs targeting SOCS1, PTPN2, and ZC3H12A in TILs are assessed in these assays. For example, cells in which both SOCS1 and PTPN2 are inactivated should demonstrate activity in assays measuring both SOCS1 and PTPN2 pharmacology.

[0468] In addition to the negative role of PTPN2 on T cell receptor (TCR) signaling, both SOCS1 and PTPN2 are negative regulators of JAK/STAT signaling. Therefore, SOCS1-dependent and PTPN2-dependent pharmacology can be measured by increases in JAK/STAT signaling.

[0469] SOCS1 negatively regulates cytokine signaling in T cells, in part by inhibiting JAK1, a kinase involved in STAT5 phosphorylation and cytokine signal transduction. Upon IL-2 signaling through the IL-2 receptor complex, STAT5 is phosphorylated in a JAK1-dependent manner. Therefore, levels of pSTAT5 and activation of downstream signaling pathways upon IL-2 stimulation may serve as an assay measuring SOCS1-dependent pharmacology in TILs. Indeed, deletion of SOCS1 lead to an increase in pSTAT5 levels in primary human CD8 T cells in response to IL-2 signaling (FIG. 5).

[0470] PTPN2 also acts as a negative regulator of cytokine signaling, including IL-2 and IFNγ, by directly dephosphorylating STAT proteins such as pSTAT1 and pSTAT3. Therefore, levels of pSTAT1 and pSTAT3 and activation of downstream signaling pathways may serve as an assay measuring PTPN2-dependent pharmacology in TILs. Indeed, Cas9-mediated genetic knockdown of PTPN2 leads to increased pSTAT1 levels in Jurkat T cells in response to IFNγ stimulation (FIG. 6). PTPN2 is also a negative regulator of TCR signaling. Both LCK and FYN transmit positive signaling downstream of the TCR, and are direct targets of PTPN2 phosphatase activity following TCR activation. Therefore, the impact of genetic inactivation of PTPN2 on proximal T cell receptor signaling may be assessed by quantifying pLCK and pFYN following TCR stimulation.

[0471] In conclusion, direct assessment of SOCS1 and PTPN2 pharmacology in dual-edited cells can be conducted using 1) cytokine stimulation and pSTAT assays and 2) TCR activation and downstream signaling assays.

[0472] To determine the impact of genetic inactivation of SOCS1 and PTPN2 on cell function in vitro, multiple parameters may be assessed that correlate with T cell function. These include cytokine production (e.g., IL-6 and IL-12), baseline cell surface phenotypes and activated cell surface phenotypes, T cell differentiation state, and tumor-killing ability.

### Example 14: Manufacturing of Dual-Edited Tumor Infiltrating Lymphocytes

[0473] Dual-edited TILs are manufactured following established protocols used previously in FDA-approved clinical trials for the isolation and expansion of TILs.

[0474] Following removal of tumor tissue, the tumor is both fragmented into 2 mm³ pieces and mechanically/enzymatically homogenized and cultured in 6,000 IU/mL recombinant human IL-2 for up to 6 weeks or until the cell numbers reach or exceed 1×10⁸; this is defined as the pre-rapid expansion phase (pre-REP) of TIL manufacturing. Upon completion of the pre-REP stage TILs are electroporated with gRNA/Cas9 RNP complexes targeting SOCS1, PTPN2, and/or ZC3H12A under cGMP conditions. Cells may be also electroporated prior to or during the pre-REP process. Following electroporation, 50×10⁶ cells are transferred into a 1 L G-Rex™ culture flask with a 1:100 ratio of TIL:irradiated feeder cells for approximately 2 weeks. This portion of manufacturing is defined as the rapid expansion phase (REP). After the REP phase, TIL's are harvested, washed, and suspended in a solution for immediate infusion into the patient.

[0475] Using methods similar to those above, edited tumor infiltrating lymphocytes were generated at miniaturized research scale in three independent donors. SOCS1 single edited, PTPN2 single edited, ZC3H12A single edited, SOCS1/PTPN2 dual edited, and SOCS1/ZC3H12A dual edited cells were produced. Briefly, after the pre-REP expansion of TIL in IL-2, TILs were taken and resuspended in Maxcyte electroporation buffer (Maxcyte) at a concentration of 30M cells/ml. Per 20 μl of cells in electroporation buffer, 5 μl of RNP solution was added. Per 5 μl reaction, RNP solution was composed of 0.85 μl 61 μM sNLS-spCas9-sNLS (Aldevron), 1.75 μl of PBS, and 2.4 μl of 100 μM total sgRNA solution. sgRNA solutions were comprised of either 2.4 μl of a single sgRNA, or 1.2 μl each of 2 different sgRNAs. The guides used were as follows: SOCS1—GACGCCTGCGGATTCTACTG (SEQ ID 25), PTPN2—GGAAACTTGGCCACTCTATG (SEQ ID 190), and ZC3H12A—CAGGACGCTGTGGATCTCCG (SEQ ID NO: 219).

[0476] Cell/RNP solutions were loaded into Maxcyte processing assemblies (Cat # OC-25X3 or OC-100X2), and subsequently electroporated using a Maxcyte STX, using the program “Optimization #9”. Cells were recovered from the processing assemblies and added to 2× the volume complete REP media (50:50 mix of AIMV media (Gibco #12055) and RPMI 1640 (Gibco #11875), supplemented with 5% heat inactivated human AB serum (Valley Biomedical). Cells were allowed to recover at 37 C for 20 minutes.

[0477] Subsequently, TILs were seeded into the REP by transferring them to either 6-well (10 cm² surface area per well) or 24-well (2 cm² surface area per well) Grex flasks at a density of 50,000 TIL per cm². Flasks additionally contained irradiated PBMC feeder cells at a density of 5M per cm², 6000U/ml of recombinant human IL-2, and 30 ng/ml OKT3. REP was carried on for 14 days, during which cells were fed IL-2, fresh media containing IL-2, and/or cells were split. At day 14 of the REP, cells were harvested and editing efficiency was determined by amplicon sequencing of the genomic DNA of the cut site. Editing efficiencies were as noted in Table 26 (numbers reflect the percentage of DNA reads that demonstrated a mutation from the expected wild-type sequence):

TABLE 26

| | | Target | % | Target | % |
|---|---|---|---|---|---|
| Donor | Sample | Locus 1 | Edited | Locus 2 | Edited |
| A | ZC3H12A/SOCS1 | SOCS1 | 98% | ZC3H12A | 99% |
| | dual edit | | | | |
| | SOCS1/PTPN2 dual | SOCS1 | 98% | PTPN2 | 97% |
| | edit | | | | |
| B | ZC3H12A/SOCS1 | SOCS1 | 98% | ZC3H12A | 99% |
| | dual edit | | | | |
| | SOCS1/PTPN2 dual | SOCS1 | 96% | PTPN2 | 92% |
| | edit | | | | |
| C | ZC3H12A/SOCS1 | SOCS1 | 98% | ZC3H12A | 98% |
| | dual edit | | | | |
| | SOCS1/PTPN2 dual | SOCS1 | 84% | PTPN2 | 71% |
| | edit | | | | |

### Example 15: Efficacy of Dual-Edited Tumor Infiltrating Lymphocytes in Lymphodepleted System

[0478] Anti-tumor efficacy of Ptpn2/Socs1, Ptpn2/Zc3h12a, or Socs1/Zc3h12A dual-edited tumor infiltrating lymphocytes (TILs) was evaluated in mice using the B16Ova subcutaneous syngeneic tumor model with lymphodepletion in contrast to Example 6 and 10. Two mice cohorts were used in this experiment: a donor cohort of CD45.1 Pep Boy mice (B6.SJL-Ptprc^{a} Pepc^{b}/BoyJ) and a recipient cohort of CD45.2 C57BL/6J mice (Jackson labs), each comprised of 6-8 week old female mice.

[0479] To generate TILs, donor CD45.1 Pep Boy mice were injected subcutaneously with 0.5×10⁶ B16-Ova cells. On Day 14 post-tumor cell inoculation, tumors were harvested to generate edited CD45.1 Tumor Infiltrating Lymphocytes (TILs) to infuse into the second cohort of mice as described above in Example 1. These TIL cells were edited by electroporation of gRNA/Cas9 complexes comprise (1) a non-targeting control gRNA; (2) a single gRNA targeting the Ptpn2, Socs1, or (3) 2 gRNAs, one targeting each of the Socs1 and Ptpn2 genes or the Socs1 and Zc3h12a genes. The editing efficiency of the dual gRNA/Cas9 complex targeting the Socs1 and Ptpn2 genes was assessed using by NGS and was determined to be 85% and 71%, respectively. The editing efficiency of the dual gRNA/Cas9 complex targeting the Socs1 and Zc3h12a genes was assessed using NGS and was determined to be 94% and 90%, respectively. In additional experiments, TIL can be edited by electroporation of gRNA/Cas9 complexes targeting each of the Ptpn2 and Zc3h12a genes.

[0480] Recipient CD45.2 C57BL/6J mice were injected subcutaneously with 0.5×10⁶ B16-Ova tumor cells. When tumors reach a volume of approximately 100 mm³ mice were randomized into groups of 10 and injected intraperitoneal with cyclophosphamide (200 mg/kg) to induce lymphodepletion. The following day mice were injected intravenously with edited CD45.1 TILs via tail vein. In additional experiments, mice can be injected intraperitoneally with recombinant human IL-2 (720,000 IU/Kg) twice daily for up to a maximum of 4 days. Body weight and tumor volume were measured at least twice per week. Tumor volume is calculated as mean and standard error of the mean for each treatment group and the % TGI is calculated on Day 17 according to the following formula:

% TGI=(Combo TV_{final})−Combo TVᵢₙᵢₜᵢₐₗ)/(Control TV_{final}−Control TVᵢₙᵢₜᵢₐₗ),

[0481] where TV=mean tumor volume, final=Day 17 and initial=day of edited TIL transfer.

[0482] These data demonstrate that treatment with dual-edited TILs leads to enhanced anti-tumor efficacy compared to the anti-tumor efficacy observed after treatment with single edited TILs in a lymphodepleted system.

TABLE 27

| | Lymphodepleted mTIL |
|---|---|
| Gene Target | model |
| Ptpn2 | + |
| Socs1 | − |
| Dual Ptpn2/Socs1 | + |
| Pdcd-1 | − |
| Dual ZC3H12A/Socs1 | ++ |

(−) = no efficacy observed; (+) = modest responses in majority of animals; (++) = strong responses in the majority of animals; (+++) = strong responses, including some complete responses, in all animals treated

### Example 16: Functional Characterization of SOCS1/PTPN2Dual-Edited TIL

[0483] SOCS1 I PTPN2 dual-edited TILs, and control TILs (edited at the OR1A1 locus, which is not expressed in T cells) were generated using methods as described in Example 14. The ability of TILs to produce inflammatory cytokines was assessed. Briefly, 200,000 viable TILs from 5 unique donors were seeded into the wells of a 96-well plate. The volume of media in the well was 200 μl, comprised of 180 μl of REP media (a 50:50 mix of AIM V (Gibco) and RPMI 1640 (Gibco), supplemented with 5% heat inactivated human AB serum (Valley Biomedical)) and 20 μl of anti-CD3 activation tetramer (Stemcell Technologies, custom reagent). The TILs were incubated at 37 degrees Celsius for 18 hours in a 5% CO₂ humidified chamber. After incubation, culture supernatants were harvested and the levels of IFNγ and TNFα in the supernatants were measured using by V-plex cytokine plates and a Quickplex SQ 120 machine (Mesoscale Diagnostics). Dual SOCS1/PTPN2-edited TIL demonstrated a comparable ability to produce IFNγ (FIG. 7A) and an increased ability to produce TNFα (FIG. 7B) compared to controlled edited TILs.

[0484] The ability of SOCS1/PTPN2 dual-edited TILs to undergo degranulation upon stimulation was also assessed. 500,000 TILs were stimulated in a 96 well plate with 1/500 dilution of Cell Stimulation Cocktail (Invitrogen) in the presence of golgiplug (BD) and fluorescent anti-CD107a antibody (BD) for 4 hours. Cells were subsequently stained for T cell markers, and CD107a positivity and fluorescence intensity on T cells was assessed by flow cytometry. Dual SOCS1/PTPN2-edited TILs demonstrated increase in degranulation (FIG. 7C) and CD107a intensity (FIG. 7D) as compared to control edited TIL.

### Example 17—Efficacy, Mechanism of Action and Rechallenge of Ptpn2/Socs1 Dual-Edited Transgenic T Cells in Murine Syngeneic Tumor Models

[0485] OT1 T Cell and B16-Ova Tumor Cell Model:

[0486] Anti-tumor efficacy of dual-edited Ptpn2/Socs1 CD8+ T cells was evaluated in mice using the B16Ova subcutaneous syngeneic tumor model. 6-8 week old female C57BL/6J mice from Jackson labs were injected subcutaneously in the right flank with 0.5×10⁶ B16-Ova tumor cells. When tumors in the entire cohort of mice reached an average volume of approximately 100 mm³, the mice were randomized into five groups of 10 to 20 mice each and injected intravenously with edited murine OT1 CD8+ T cells via tail vein injection. Prior to injection, these cells were edited by electroporation with gRNA/Cas9 RNP complexes comprising (1) a non-targeting control gRNA; (2) a single gRNA targeting the PD1 gene (SEQ ID NO: 270); (3) a single gRNA targeting the Ptpn2 gene (SEQ ID NO: 202); (4) a single gRNA targeting the Socs1 gene (SEQ ID NO: 9); (5) 2 gRNAs, one targeting each of the Socs1 and Ptpn2 genes. Editing efficiency of the gRNA/Cas9 complex targeting the Ptpn2 and Socs1 genes was assessed by next-generation sequencing and determined to be 80.3% and 87.6%, respectively. Body weight and tumor volume was measured at least twice per week. Tumor volume was calculated as mean and standard error of the mean for each treatment group. The percentage tumor growth inhibition (TGI) was calculated according to the following formula:

% TGI=(Ptpn2/Socs1 TV_{final}−Ptpn2/Socs1 TV initial)/(Control TV_{final} Control TVᵢₙᵢₜᵢₐₗ),
[0487] where TV=mean tumor volume, final=Day 7, and initial=day of edited mouse OT1 CD8+ T cell transfer.

[0488] Mice that completely rejected the original large B16Ova tumor were then rechallenged subcutaneously in the left flank with either 0.5×10⁶ B16-Ova tumor cells (n=6) or 0.3×10⁶ B16F10 tumor cells (n=5) on day 76. Body weight and tumor volume was measured at least twice per week. Tumor volume was calculated as described above. At various timepoints before and after rechallenge the mice were bled via tail stick and samples were analyzed via flow cytometry to track the OT1 CD8+ T cells and their phenotype in peripheral blood.

[0489] The data in FIG. 8A shows that adoptive transfer of Ptpn2/Socs1 dual-edited mouse OT1 CD8+ T cells resulted in seventeen out of eighteen mice achieving complete responses against the B160VA tumors. FIG. 8B shows that all mice that previously had rejected a B16Ova tumor were subsequently able to reject a second inoculation of B16Ova compared to naïve mice. Two out of five mice that previously had rejected a B16Ova tumor were also able to completely reject a second inoculation with parental B16F10 that does not express neoantigen. FIG. 8C OT1 shows CD8+ T cells underwent a rapid expansion in peripheral blood eight days after rechallenge. FIG. 8D displays characterization of these same OT1s shifting from a central memory phenotype prior to rechallenge to an effector phenotype eight days after the second inoculation of B16Ova. This was followed by a contraction back to a central memory phenotype out to day 84 post rechallenge.

### Example 18. Increased Potency of Ptpn2/Socs1 Dual-Edited Mouse T Cells

[0490] To assess the relative potency of Ptpn2/Socs1 dual-edited mouse OT1 CD8+ T cells in the PD-1 resistant large tumor B16Ova model, four different doses were tested versus their control edited equivalents. These studies were initiated as described above in Example 3 with initial starting tumor volumes of approximately 355 mm³ at which point either Ptpn2/Socs1 dual-edited or control edited mouse OT1 CD8+ T cells were adoptively transferred intravenously at doses of 4.1×10⁴, 4.1×10⁵, 4.1×10⁶, or 4.1×10⁷ cells per mouse. Editing efficiency of the gRNA/Cas9 complex targeting the Ptpn2 and Socs1 genes was assessed by next-generation sequencing and determined to be 66.4% and 86.5%, respectively. Body weight and tumor volume was measured at least twice per week. Tumor volume was calculated as described above. As shown in FIGS. 10A-10H, adoptive transfer of control edited mouse OT1 CD8+ T cells resulted in delayed tumor growth only at the highest dose, 4.1×10⁷ T-cells per mouse, with no complete responses observed. In mice dosed with an equivalent number of Ptpn2/Socs1 dual-edited mouse OT1 CD8+ T cells nine out of ten complete tumor regressions were observed. Additionally, at lower doses of Ptpn2/Socs1 dual-edited mouse OT1 CD8+ T cells significant anti-tumor activity was observed with one out of ten mice showing complete tumor response in the 4.1×10⁵ group. Taken together, these data demonstrate that Ptpn2/Socs1 dual-edited mouse T cells were approximately 10-100× as potent as control edited mouse OT1 CD8+ T cells.

### INCORPORATION BY REFERENCE

[0491] All references, articles, publications, patents, patent publications, and patent applications cited herein are incorporated by reference in their entireties for all purposes. However, mention of any reference, article, publication, patent, patent publication, and patent application cited herein is not, and should not be taken as, an acknowledgment or any form of suggestion that they constitute valid prior art or form part of the common general knowledge in any country in the world.

The application's sequence listing, which the Patent Office published only in electronic form, follows.

SEQUENCE LISTING (824 sequences)

SEQ ID NO: 1 - DNA, 1766 bp, Homo sapiens
ggcagctgcacggctcctggccccggagcatgcgcgagagccgccccggagcgccccggagccccccgccgtcccgcccgcggcgtcccgcgccccgccgccaggtgagccgggccctgggcgaggaggcgggagggaggagggaggggagtccagggcagccaggagtcgggcgagcctcgggggctgcagaatggggtcgcggccgcgatgcccctgaccctcgccggccccacccaggccgccccccgcgcgcggggctcccgcagcacagcctttctccggccctagcccaaatcgcccagaccaggcgcggatcccagcctggccagcaggcggcgggcgcggggcggcgagccggggccggacggctggagccagaaccggctgctctccacgcccccctctcggtgctgcccggaggccggactccgcctccaccgagcccccacccgccgggaagagctccgcggagtacagagcccattttctagctgtgtccactgaggctgaacggatccgcgcggacttggtgctccgtgctcgccccctagggccgggtccgccgggagcgccgccctccggagttgtccggccggcgcacacctgcccggccccgcagcgccccagctcacctctttgtctctcccgcagcgcacccccggacgctatggcccacccctccggctggccccttctgtaggatggtagcacacaaccaggtggcagccgacaatgcagtctccacagcagcagagccccgacggcggccagaaccttcctcctcttcctcctcctcgcccgcggcccccgcgcgcccgcggccgtgccccgcggtcccggccccggcccccggcgacacgcacttccgcacattccgttcgcacgccgattaccggcgcatcacgcgcgccagcgcgctcctggacgcctgcggattctactgggggcccctgagcgtgcacggggcgcacgagcggctgcgcgccgagcccgtgggcaccttcctggtgcgcgacagccgccagcggaactgctttttcgcccttagcgtgaagatggcctcgggacccacgagcatccgcgtgcactttcaggccggccgctttcacctggatggcagccgcgagagcttcgactgcctcttcgagctgctggagcactacgtggcggcgccgcgccgcatgctgggggccccgctgcgccagcgccgcgtgcggccgctgcaggagctgtgccgccagcgcatcgtggccaccgtgggccgcgagaacctggctcgcatccccctcaaccccgtcctccgcgactacctgagctccttccccttccagatttgaccggcagcgcccgccgtgcacgcagcattaactgggatgccgtgttattttgttattacttgcctggaaccatgtgggtaccctccccggcctgggttggagggagcggatgggtgtaggggcgaggcgcctcccgccctcggctggagacgaggccgcagaccccttctcacctcttgagggggtcctccccctcctggtgctccctctgggtccccctggttgttgtagcagcttaactgtatctggagccaggacctgaactcgcacctcctacctcttcatgtttacatatacccagtatctttgcacaaaccaggggttgggggagggtctctggctttatttttctgctgtgcagaatcctattttatattttttaaagtcagtttaggtaataaactttattatgaaagtttttttttt

SEQ ID NO: 2 - DNA, 1729 bp, Mus musculus
agcagagagaactgcggccgtggcagcggcacggctcccagccccggagcatgcgcgacagccgccccggagcccccagccgcggctccccgcgtcctgccgccaggtgagccaaggcagctgcgagggagcaggcgggaggggatgggaggtgatgggagcagagcccggcaggactaacctcgcagactgtatggcagggtcgaggatgccacgcctctggcgcccccccacccccgccccggctcccccaggaggcccctcgctcgagcggggcgccgtcagcccctcctctccggccctgagccctgatcctccgcccgggttccagtccccggcgtggccagtaggcggcagccgcgaggcgactagccaccagcggggacggccgggagtcgggcccctctccacgcccccttctccacgcgcgcggggaggcagggctccaccgccagtctggaagggttccgcatacaggaacggcctacttcgcagatgagcccaccgaggctcaagctccgggcggattctgcgtgccgctctcgctccttggggtctgttggccggcctgtgccacccggacgcccggctcactgcctctgtctcccccatcagcgcagccccggacgctatggcccacccctccagctggcccctcgagtaggatggtagcacgcaaccaggtggcagccgacaatgcgatctccccggcagcagagccccgacggcggtcagagccctcctcgtcctcgtcttcgtcctcgccagcggcccccgtgcgtccccggccctgcccggcggtcccagccccagcccctggcgacactcacttccgcaccttccgctcccactccgattaccggcgcatcacgcggaccagcgcgctcctggacgcctgcggcttctattggggacccctgagcgtgcacggggcgcacgagcggctgcgtgccgagcccgtgggcaccttcttggtgcgcgacagtcgccaacggaactgcttcttcgcgctcagcgtgaagatggcttcgggccccacgagcatccgcgtgcacttccaggccggccgcttccacttggacggcagccgcgagaccttcgactgccttttcgagctgctggagcactacgtggcggcgccgcgccgcatgttgggggccccgctgcgccagcgccgcgtgcggccgctgcaggagctgtgtcgccagcgcatcgtggccgccgtgggtcgcgagaacctggcgcgcatccctcttaacccggtactccgtgactacctgagttccttccccttccagatctgaccggctgccgctgtgccgcagcattaagtgggggcgccttattatttcttattattaattattattatttttctggaaccacgtgggagccctccccgcctgggtcggagggagtggttgtggagggtgagatgcctcccacttctggctggagacctcatcccacctctcaggggtgggggtgctcccctcctggtgctccctccgggtcccccctggttgtagcagcttgtgtctggggccaggacctgaattccactcctacctctccatgtttacatattcccagtatctttgcacaaaccaggggtcggggagggtctctggcttcatttttctgctgtgcagaatatcctattttatatttttacagccagtttaggtaataaactttattatgaaagtttttttttaaaagaaacaaa

SEQ ID NO: 3 - DNA, 98858 bp, Homo sapiens
gctcgggcgccgagtctgcgcgctgacgtccgacgctccaggtactttccccacggccgacagggcttggcgtgggggcggggcgcggcgcgcagcgcgcatgcgccgcagcgccagcgctctccccggatcgtgcggggcctgagcctctccgccggcgcaggctctgctcgcgccagctcgctcccgcagccatgcccaccaccatcgagcgggagttcgaagagttggatactcagcgtcgctggcagccgctgtacttggtgagtcgcggacccacgcggcagtcgccgacctcctccgagacccggactcgtgccctgtccgcagggtccctcccgcctcccccgcctctcgcctctagcctctcgctcggggcggaagtggcggcgcggtccgcgtcaggggcgcgcctgcgctgaccgctctcttgctccttttggtttaaaaaaaaaaaaaaaaaaagcatacttgagctgagcagctcatggttagcgcaagcgcagttagttctggagggcggtgccacagcggcttcttggggagcgcgtggatgcgccaccagcgttgcgcggcccgggtctgggggtccttgggaaagccgtgggggcgctcgggcgcgcgcccccgggccgcagcttcgccgtagctcccacgccgctgtgcttggttcttgctcgcggacagctctttctctggccgggtgttttgtggccgggtgggcagctggcgtccccgggagcggtgagggcgggggcgggcgagccgggccgcggcgtccgggtccagctggcgcccgcgcaggacctgtgggagcaggccgctctgggcgccgggccggccgccgcagccctctgcgaggcgaagctcgctctcctggcggagccgcggtggttgggggtggctcgtggcctctggcgagggcagcgctctcgggaccctccgtcttcattttcccccgtggcccagcagcgcccagcgtgggttcggcccccatagaaccttcccggaacgaaagaggctttgcttgtgttcgtccagtgatagcgtgtcattctctttatagttttccttactgaggtatactttccctacagtgaaacgcagctttcatgtgtgctcccagacgggtgtcacaaatgaatcccctcttgcaagccccctcaaatcaaaatagcctttccttgccctgagaaagtgccctcatcccctccccgggggcacggtgttccgatgcctatcgccctaatcgtgcctgttcagctcacatagatgcaatatgtagtataaacacctgtgattcgctttttttatgtcaactagactaccttttaattcaaacaaaactttatctcttttaaaatgatgtaactgctttccccttcgtttaatccttgtcgtattattcccaagattgaatttggtgacggttaagttaatgctgcttctgatgtttggttctctctgtgtaaagtaaaagacgggctttcctgtaaatggatgatcctgggtttttcccctttccatttaattagatggcagtgaaaaatgtgttcagaaagtaacgttttcttcttgaacacattagtgggaagtataaatattctgattcccatgatacagagtatgttagaatagggatctaagttttaaagaatgctggtaaggactcttccaattatagacaatctgaaacgcaaattctggtaggaatcttcatgtgagagagcctgccagctgcatcttctccagttacatttgttttagcagaggctgctgtctctctaagggataggttatatatcgaaatagatttgaaaagagaaaagtgaatataacttaattcagcttaacattttggtttaagaaatttaattttctttggtatcattaatatccttgaaaattcaatgagaattgtgattcctctttccagaaaaatgaacttaactcgcatccactggagatttcacatgcattttcaaaaagataaggaaatccttctatagattcttaccgaggaatcctgtagtttccttggttggtcaatgctcatattattttttcctagttgaaaacaagaccattagtttggtcagtagaaaccatggcatgcacactggtgttacagtaaaagtaggtcacaaaccaagaaagttagtaatggaaagcaagtcaggaagtttgagctatgtgttctcctgtggccttagaacatccattcagccattccacaaatatgcccggacccccagtggagttgcagcttttgctcctggccttggggattcagcagagaatgctcctggcaagtttcctaccctcgaggtgctcactctagggcttattcttttggggcctcattgtagttccatattttcattcattcgttcataacatgcttgttatgtgctagtgttagacactgaggattcttgttaaaagacaggagtcccagtttttaaggatgcagccctgtaaataggtaagctgatgaaaacgttaaagtgatacatgtaaagctagcttgaagcacagggtcttgtggagttgagttacctaggagtcctgtatttcccaaaaaggggtacacatgggagttctggtgaagcttctcgagggagggaggacctcacctaagtcttgaaagacattggccaggggaagaggacaagggaggtgaagagaattactgttccagcaaggagggagtgcacaaaggcactgagggaatgctgagagaaccacccacagtttagcctggagactggtgtgaagttgagatgctggagagtaaggcagagcctagatcagactaaggaatttgagctgtttaataggaactcattgtggaattgtaagtctggaaataccatgatcatatttgcttcttttttttttgacagagtcccgctctgtcgcccaggctggagtgcagtggtgcgacgtcagctcactgcaacctctgcctcctgggttcaagtgattcacttacctcagcctcctgcgtagttgaaattacaggcacacaccaccatgcccggttgatttttttgtacttttagtagagacagggtttcgacatgttggccaggctggtctcgaactcctgacctcaggtgatccgcctgcctcggcctctcaaagtgctgggattacaggcatgagccactgctctgggctgatcatatttacttgttagcaagatcgttctgactgctagcagactggatgaggaaagtgtaggcacgcagcacagggcagtagtcggttggagtaaacctgaagagacatgatgagcttctgttaggcagtggcaggagggatggaggggagatacagatttgaaatgaaatggtaaaggggtatacgttatgtacaagtttggttttgaaactttaattctgtttgaggtacctgcgagacactgaaatgaagctagttgaatgtataaatttggagttcgggagagagggtctgagtaaatgtgattttggaaatcatgaacacatgggtgatatttgaggtcttagacattgatgagatcatctagggaagatacagagcgtttggaaatatcaaaggccaaggacagaatcttgacagacaacatttaaaaggatgggtggagaaagaggaacttgcaaaaaagactggtgaggaacaaccacagaagtggggaggaaagcagtggagggagttgagggtgagcagggccacctgacaggtaagggccagcctgagagggccatgacattgagcagctagattaacagataccttaaagggagttgtgtcagcggactacacaagacagatacctggagttcaggagagaaggtaggaggaaatgcaaactaccaagtgtacactgctctttttagaagcccaacttgaagaagtggggagaggtagctaaaatgaagcaagattgtgtgacttctcacttaaacccttgaacggctttccgttgctcacagtgtaaattcagcccctcctccggctcacaagacctcatggcctgtgtctcttgcttgatttcccctatcactttcctccctcttttccactgtgttgtattcttggaagtgtgtgtgtccattctccccttagggcgtttgtaaatgttgttctctttgccttggcacaactttccccccttctctttcctttcttgcttaaactgcctcctactcatccctgaagtctcacttccttggcaggccttcttgacctgcccatgctgggtatgagcccctgttgcgtacttctttagcatcccaagacttcccctttcatagcgggaattggatgtcatacagcagcaaatgatttcgggaacacaatttgcattaagcaaaccactatcttgaaagtaacacagcttgagtaggaaaaaagtgtttaaggtggctttctgctttgtttagcacagcagtgggtgatgtttctgataatgtttttgaagagttgtgctttttttggtaatgctcatggagctgggaaaagaaaggctttgctcttgagcaaaaactgagtacaactaaaagctggacttgcttagtggtaggagaacttgataccttgttgaaattctagcgggaaaaatgaatttagtattttgagtctggaactctggtcccttattcctttttgctccttttgaaaagtgtcttttatttcatgagtttgataataggaggtttcttagaaatgaattattgggttggagcagaacagactctgttaatctgagtttatattttttattacttcttcagagtttcatgaaggcactgccagtgctttgcacagtatcaggtgcttagtaagcacttgaaaatatgtgctgaatgaatgactttttacgaggaaagggcaacttgatatatttatgtgattgcagggatgaacctaaagagagaggtggaggttgaaatagaagggatgattgttggagccagaaatcttagaaagcaagagtcaatgggaccaagagcacacaggtggaagaattgatcgtgaaagagtgctggccaggcggtggctcatccctgtaatcccagcgctttgggaggctgaggtgggaggatcacttgaggtcaggaggttagggctgcagtgagccataattgtgccactgcactacagactaggtgacagagtgagatcctgtctctaaaacaagaacagcaaaacaaagggtgcagttggaaaagtttaatttggtctgattgtgtgaggttaattctgactttttgagtaatgttcatgatccctttttggcttttccttttgtcactgctgattgctgtcttcatcaggctgagctttgagaaaggcagagagaaggaatggagtctgtgtgcctactgaggaaaagactaaaactggggaatcgcaaaagctatgttatgggttgtttctaagaagtgatggctcagaaggaatttggcttatttatttttaaattcctttcttttttaaagagttctcactctgttgcccagtctggagtacaagtgcagtggtgcaatcatagctcactgcaaccttaaactcctgggctcaggtgagcctctcacctcagcctcttggaaattggttgattaattagggtttataaacaatggaactcctgactgacttcatttttctttttttgaaaccaagtcttgctctgtcccccaggctggagtgcagtagtgtgatctcagctcactgcaacctctgctccccccaggttcaagcagttctactgcctcagcctcccgagtagctgggattacaggtgcccaccagcacgcccagctaatttttgtatttttagtagaaacggggtttcaccatgtttgtcaggctggtcttgaactcctgacctcaggtgatccacctgcctcggcctcccaaagtgctgctgggattacaggtgtgagccaccacgcccagccacatttttctttttctttctttttttcctttttctttctttttttttctttttctttcttttctttttgagactgggtctcactttgtcacccagtctggagtgcagtggcgtgatctcagctcactgcagtctcgacctcttgggctttagacatcctcctgcctcagtcccccacgtagctgggcctggctaatttttttgtattttttgtagagacagggtttaactattttgcccaggctggtcttcaactcctgagttcaagcaatctgtccacctcagccttccaaaggcttaggattacaagcatgagccactgtgcctggccatttttcttttttctttttctttttttgagacagtcttgctctgttgcccaggctggagtgcagtggcgtcatctcggctcgctgcaagctctgcctcccaggttcacgccattctcctgcctcagccttctgagtagctgggactacaggcgcccgccaacactacaggcgcccgccaccacgccaggctaattttttgtatttttagtagagacggggtttgaccgtgttagccaggatggtcttgatctcctgactttgtgatccacctgcctcggcctcccaaagtgctgggattataggcatgagccactgcgcctggccgccatttttctttattagaaatttgtagttcaaatattgctagagaacaatttttaccatttgtgagtcagctaatttttagaagtcagatatcaagtgcacactgttcttctcatacttacagcggggcagccagttaggcaggtgaatcaaagctgtcttattctaaaacacttcccttgcctactagttacacattctcctgcctgctgtctaatctcagtgcttttacatggttgcacaaactctgaattcccttgaagattggctactctctcacaccttggagtcttcatgtgttggatatactccatgcctaccatatctatttgggaaacatcttcaagactagaccgtagtctccttgggcaaagttaaatgctcccccttctctcatttcttagttctctatattcttttattagaatatgaaccacattgttttgtaactgtctacttgtctgttctgtgtagctccttgagggtggtctttttttttctttgttttcccaccacctacctacgggacctgaaacatgttagatgctcagtaaatattcagtaaacacaggaaaactgttcccttttaaaatgtcagcaccttagtttattccaaacccctcatttatggctgaggaaacactgggccaatacagtgttgtgacttatctgatgttacaatatctgctagtgtcataactgggactcaaatccagtccttctgattctcgtttcagcactgccctaatttacccatgtgactacctgtagtgctttcttcttatgatctatttgagatcagtggcacagagggaatcgtcttaattttgatggctaggagggagtggatgtgttataataggtagggtcattttgggacttgaggcctttaaaacagtgtctgggatccagggatcagacttgaaaggtatttgcaaatctcctgaaactgctaaattttatgtacgtgtgttcccaggtatttcgtttctaggtgattctgtagcttttgtcagtttcttagtggatttgtctgtgatccctcaaaaggtaaagaccactgcttgaagggaaagcagccttgggatgggtgccccaatggggaatgtatacctagaaatcatattgttttgcctttgacatgtgtttatagattactgatatctataattacggaaatccagatagttgcgtttgtctcctagcttttctagttgcctcttttttgatttcttgattttaaccagaatcttctttttttcttgagaaggggtctcattccgtcacccaggctggagtgcagtggcacgatcgtaggtcactgcagactcaaaactcctggctcaagtggtcctttgcctcagcctcccgagaagctgggactacaggcacacaccaccacgcctgacaaatttcttcttcttcttcttctttttgttgttgttcttgttggccaggctggtctggtcttgaactcccggcctcaagtggtctgctcaccttggcttcccgaagtggcgagattacaggcatgagccaccatgcccagcccttaaccagaattttgttttgttttgttttttgagacagggtctcactctgtcacccagactggagtgcagtgatgagatcacggctcactgcacagatgcacgccaccatgcttggctaattttttatgttttgtagagacaggttctcaccatgttgtccagactggtctcgaactcccgggctaaagcgatcttccggcttcacccttccataatgctggggagccacagtgcttggccaaccagaatcttaaaagccctttttactttttccagatagttactctgcagagaatttctgattcccagttggagaactgttacagctctctcagtcccctgctgttcttttagctaccttgtctttgtcctcttacctgtccactctctactccccttcttccctttggtctccaaatagtccagataaaccagagagatggacagataaggtctgggtacgcgaaattaaaattaacatagtgtgctcttcactttcttgaataaacgttacgtatgatttgtttcccttggaaatcctcatctagattctctactctctattccttaacttaatgccccattaaggtagttttttcttaatggaaagctgttgagagtcagaggatatttaaaccaactaataaactgaacttttaataataccacccttactttggataagagtgattagccatatactaaatcctcaatcagtttagcatgtaaaatttaagacatagcagctgataactgaggaagagatacatttccacaggctaactttaaagaatataagctctcactttcctgagtagaagaaaactaaacttttctgttctatgctttttttttttttaatttttatttttattgatcattcttgggtgtttctcacagagagggatttggcagggtcataggacaatagtgaagggaaggtcagcagataaacaagtgaacaaaggtctctggttttcctaggcagaggaccctgaggccttccgcagtgtttgtgtccctgggtacttgagattagggagtggtgatgactgttaacgagcatgctgccttcaagcatctgtttaacaaagcacatcttgcactgcccttaatccatttaaccctgagtggacacagcacatgtttcagagagcacagggttggggggtaaggtcacagatcaacaggatcccaaggcagaagaatttttcttagtacagaacaaaatgaaaagtctcccatgtctacttctttccacacagacacggcaaccatccgatttctcaatcttttccccacctttccctgctttctattccacaaaaccaccattgtcatcatggcctgttctcaatgagctgttgggcacacctcccagacagggtggtggccgggcagaggggctcctcacttcccagtaggggcggccgggcagaggcgcccctcacctcccgggtggggcggctggccgggcgaggggttgacccccccacctccctcccggacggggcggctggccgggcggggggctgacccccccacctccctcccggacggggcggctggccgggcggggggctgaaccccccacctccctcccggacggggcggctggccgggcggggagctgacccccccccaccttcctcccggacggggcggctggccgggcagaggggctcctcacttcccagtaggggcggccgggcagaggcgcccctcacctcccggacgaggcggcaggccgggcgggggctgatccccccacctccctcccggaaggggctcctcacttcccagtaggggcggccgggcagaggcgcccctcacctcccagacggggcggctggccaagcggggggctgacccccccacctccctcccggacggggcggctggccgggcggggggctgaaccccccacctccctcccggacggggcggctggccgggcggggggctgaccccccaacctccctcccagatggggcggctcgcctggcgggggctgacccccacctccctcctggacggggcggctgccaggtggagacgctcctcacttcccagacagggtggctgccgggcggaggggctcctcacttctcagacggggcggctgccgggcggagggtctcctcacttctcagacggggcggttgccaggtggagggtctcctcccttctcagatggggcggctgggcagagacgctcctcacctcccagacggggtcgcgaccgggcagaggcgctcctcacatcccagacggggcggcggggcaaaggcactccccacatctcagacgatgggcagccgggcagagacgctcctcacttcctagatgggatggcggccgggcagagatgctcatcactttccagactgggcagccaggcagaggggctcctaacatcccagacgatgggtggccaggcagagacgctcctcacttcctagacggggtggcggccaggcagaggctgcactctgggcactttgggaggccaaggcaggcggctgggaggtggaggttgtagcgagccgagatcacgccactgcactccagcctgggcaccattgagcactgagtgaaccagacaccgtctgcaatcccggcacctccggaggccgaggctggcggatcactcgcggttaggagctggaggccagcccggccaacacagcgaaaccccgtctcccccaaaaaaatacgaaaaccagtcaggcatggcggcgcgcacctgcactcgcaggcactctgcaggctgaggcaggagaatcaggcagggaggttgcagtgagccgagatggcagcagtacagtccagcttcggctcggcatcagagggagactgtggaaagagagggagagggagaccgtggggagacggagaccgtggggagagggagaggaggcagagggagagggagaggcttttttttttttttcttgagacggagtcttactctgtcaaccaggctggagtgcagtggcacgatcttggctcactgcaacctccacctccctggttcaagtgattctcctgcctcagcctcccaagtagcagggactacaggcatgcgccaccacacccagctaatttttgtatttttagtagagatggggtttcgctgtgttggctgggccagtcttgaactcctgacctcaggtgatccacccaccttggcctcccaaattgctgggattacaggcgtgagccaccgcgtccagcctgttacattcttaattggaatagcattgccctgcagtgccattatctgaaatagcttttaagaatgaatgtaatgccattttaaatgtatttaaatgttgtgccgatttaatgttctatgtacggtacagtactactaatggttcaagaagttgttttgacttaacagtgaaatccttgcttttaaagatcatagatacctttagacacctttaagatgaaacatgtttatgagaggaaatgtccgcacaaatacaatcccccgcaaacttagcatgtggttttagtaggttcataggcccacctggtgatccctaggataagaaattgtggtcaagaaactgatttcaggggccgggctggtggcttacacctgtaatcccagcactgtttgtctcaaaacaaagaaactggctcaaggttggatacttttcaaacgagaggaatggaggaagggaatgcaatgaataacttttcaaatccagtatgtctgatttaatatgccgtttgctctgtcagtttcatttggttcgtgtcactgatcatttataaccttttttcaaactgctttcattcccctaaggaaaatctgatactgaattattttatttcttctttcactatatttgaacggttttatagtctgaaagctatcaatttctcattacagtttacttcatagtacttctaggaattcttcctgtggtttgaggtaaggctacaggattcctagagtttgtacccctctagtcccagtaaaggacctggtacatcaatcagggtagccctagaaagttggagtaacttcgtaacagtgggaactgcttctgttctatgttttttgtgggttttttatttgtttttgtttttttgtttttttgttttttttttgagacagagtcttgctctgtggccccaggctggaatgctacggcacgatctcggcttactgcaacctctgcatgctgagttcaagcgattctcctgcctcagcctcctcagtagctgggattacaggcgtgcaccaccacgcccagctaattgttgtatttttagtagagacagggtttccccatgttggccaggctggtcttgaactcctgacttcaagtgatcagcccacctctcagagagctgggattatacatgtgagccaacatgcctgccctgcctcattctttatactacagtaaagtcccggttgggcaataatctaaacataaaagaaatgaaaccataaaattatataagaaaacaatggagaaaattttttgtaatcaacagagtgaaaaaggattttttaatgccatgtcacagaaacctagagaaaaaaggtttaagtttgatttcataaaaatttaaatttttgacataaataccataaaggtcaaaagataaaaaattttaaatattttcaatatataacaaaaactaaactttcttaatatgtaaagaactacatatcaaaaagagagcggaaatacagatggcttttaaaaacaggtaaagctgttcaccttcacaataataacaatttcaaattatgactataataataccatttttcacctatcagacaaagatgaaaaagttcattaatataattgtgtaggtgaagctcaggcactttcttatattattggtgacagtatacattgatatagcttctttgaaaggttattcatagcagcattatttataacagctaaaacctagaaataacctatgtgtcccattatagatgactggctaagtgatgaatactattaaattgttaaaaagaactcattatctatatggaagtacttttaatatatactaagtgaaaaatcaaagtgcaaaacagtatgctaatatctgttttgtgagggtgggatggatacttggatggaggaagacagacaggcagtctggcttatatatggatagaatgtctcggaaaatatacaaggcactggttacagttatcacctaagggaaaggattgagggagaggagaatgtgacttaactttttcactatatacccttttgtacggtttaatttttgccaagtccatgtaatccatgtatacatagggagcatatgtatataaatatatgtaaatataagtaaaaaaatatgtatgtgctgccgggcgcggtggctcactcctgtaatctcagcactttgggaggccgaggtgggcggatcatgaggtcaggagatcgagaccatcctggctaacacggtgaaaccccgtctctactaaaaacacaaaaaaagtagccgggcgtggttgcgggcgcctgtagtcccagctgctcgggaggctgaggcaggagaatggtgtaaacctgggaggtggagcttgcagtaagccaagatcgcgccactgcactccagcctgggcaacagagtgaaactctgtctcaaaaaaaaaaaaaaaacaacacgcttttctctctctctctctctctctctctctctctctctctatatatatatatatatatatacacatatatatatacgtatatatatacatatatatacgtgtatatatacatatatacgtatatatatgtatatatacacatatatatacacatatatatgtatatatatacatatatatacacatatatatgtatatatacacatatatatgtatatgtatatatatacatatatatatatatgctaaagttaagtactggattcctatctgtatctgctacctaactgcagtataaatcttggaagttgagtctgttttctcatttgtaaccacctcttagataacacacataaaagcacatagcacatgcctgacacacagtagggttcagtgacagtgagctgttttagtctctaaactctcttcctcaaagagagcttctcaaagaaaaaaaaatgtagtgaagaaaagaacttactccaccagggatcttctctccccagccagtggcaggcatattaagggctataagtaagtggttattttaccatcctaaagtaatggtgtttcaaagtatgcaagattcttcatacttcactgtgtccttttctgagcatctttgtagagagtatatgcacaaacatctgactaacaaagggaacacttttcatcatataatttaggattcacttagagacctaaagtataaagaaagaaacttaggtatgttagcccataaggagaaactcattatcaatttgggattatcttaaggtcctaccttataaaattaaaatttaacagaagattattctttttcaatttcctaagttcttatttgctactacatcgtagcagttcgagggagaatttggtctaacgatgtaatgttttctgtatgccatacatagaacaaagctatgtacgaaatactaaaaatattatttgacattatttaataaaatattataactatttcaccccgataatgatggaaattaagttgcagtaatatagatttttaaaataaaaacttcaaaaccaggcgccatggctcacgcctgtgataccagcgctttggaaggccgaggcaggcagattgcttgagaccaggagtttgagaccagtctaagcaacatagcaaataaaaataaaaaattagccaggcatggtggtgtgcctgcagtcccacctacttgggaggctgaggtggggggatcacttgagcccctgaagtcaaagctgcagtgagctgtgatcacaccactgcattccagcctgagtgacaaggcaagactttgtctcaaaaatataagtaaaataaaattaaaattttacttgtttatttttttgagacggcgtctctctttttcccaggctggggtgtagtggtgtgttctcggctcaccgtaacctctgcctccggagttcaagcgattctcctgcctcagcctcccgagtagctgggattacaggtacgtgccactatgcccagctagtttttgtacttttagtagagacagggttttgccatgttggcaaggctggtctcaaactcctaatgtcaagtgatccgcctgcctgggccccgcaaagtgttgggattacaggcgtgagccaccgcacccagccttaaaactttaaaattcagaatatgagcctttgttttatagcttcacttgttaaaacaaatcaggagctgggtgtggtagctcacgcctgtaatcccagcacttggggaggctgaagcgggcagatcacctggtctcaatctccctgaactcgtgatccgcccgcctcagcctcccaaagtgctggaattacaaacgtgagccaccacgcccggcctgaagtttgaagtttttaaaaagaaagagttgttaggcataattgtgtaaatagaggtaaaaattgacagcaagaaaggcagtagaaaactatgacaaatgaaggtgatggctcacgcctgtaatcccagcactttgggaggccaaggcgggcggatcacctgaggtcagtagttcaagacaagcctggctaacatggtgagaccctgtctctactaaaaaatacaaaaattagccaggcatggtgatgtgcacctgttatcccagtcacttgggaggctgaggcaggagaattcacttgaacccgggaggcggaggttacagtgagctgagatggcgccacttcactccagtctctccagtcagtccagacagagtgagactcaatctcaaaaaaaaacaaaaaacaaaaaacaacaactatgacaaataagtgtaatttcccaggactattaaggtcttgtaatcccatgcactggaagcttttgttgttgttttctgatttatcattgaagtgaccaaagcgcagtggtaagaacaagcctttgtgattacttcacactagagaagggtctttcccacatatttgagacttaaggagttgatagtgaacagtgtaagcggccacacaggtgtgggttaagaactgatgtgtgtattcactttctgtaaagatgaccaaacatatgttgttagacaaacgaaaaattcaccccaagatcattgagggcatgcaaaatagtatgaggtagaggcagctgtaattcaggtgtccaaatacaagagcaggtggagaaaagaaaagaaactgagaacagtaaagagtttttaaagttataacacacaattgttaaaatagaatgttcagtaccaagtagcagagtagataatgcagaacactgaggtggcttgagaaaaatctctcagaactcaggaaagaggtgtgcgaaatgagcgttaggagagagcacttccccaagtctgtgatagaaattcctgaaagggaacagaggagactgaagcgaaactctattaagcgacaaggaagactcaaatggagaagctaacccagttccgatgaagacttggcacatatctataatgtattttttttgaagtcagccaaaagaaagtttaaatttgaggtacatctgaaagagtaagcaatacagaaaaatcttgacaacatctgaggacaaaaaaaaaagtactgatactgttgagtgtgaggcaaaacctcactttcagtctttcttgagaaatattggcaaaatatgcccttaatacaggagttccatttttatttcatttatttatttatttatttatttattgagacaggttctcactttgtcacccaggctggagtgcagtggtacagtcactgctcactgcagccttgacctcctgggctcaagtgatcctcccagctttgcctcccaagtagctgggactgcaggcacgcatcactacgcttggctttatttttatttattatgtgtttatttttatttttattttttgtagatacgtggtttcaccatgttgcccaggctggtcttgaactcctggcctcaaatgatcctcctgccttggcccagagtgtttttgttttttttttttgtttgtttgttttttgttttttggagacaatcttgctctgtcacccaggctggaatgcagtgagtggcgcgatctcggctcactgcaaccaccgccttctgggttcaagcaattctcctgcctcagtgtcccgagtagctgggactacaggtgcccaccaccatggccagctaattttttgtattttttagtagagatggagtttcaccatgttagccaggatggtctcgatctcctgacctcgtgatttgcctcggcctcccaaagtgctgggattacaggcatgagccaccacgcccggccgagatatatttcacataccataaaattcacctaaaaggtacagtttagtggtttttagtatattcacagctgtggaactaaatcttaatttcagaatattttcaacaccccaaggagagactgggtacatacagttattctccattctcacccacatcccaacccctgacaaccactaatctactttctgtctccagatttccctgtcctggtctcataccatgtgtagtcttttgtatctgtttttttgttttgttttgttttgttttgttttgttttgttttgtttttgagaggagtctggctctgtcgcctaggctggagtgcagtggtgcaatcttggctcactgcaagccccgcctcctgggttcacgccattctcctgcctcagcctccccagtagctgggactacaggcgcccgccaccacacccggctaattttttgtatttttagtagagatggggtttcactgtgttagccaggatggtctcgatctcctgacctcgtgatccacctgcctcggcctcccaaagtgctagggttacaggcgtgagccaccgcgcccggctggtttctttaacttagcataatgttttaaagtttcatctgtgttgtatgtatcattactttgtttcttcttctaagttagtaagattccattatatagatatataccattttgtttatccattcaccagttgatggacaaatgattgttttagctattattaaaagtgctaccatgaacatatgtgtccaagtttttgtgtgaatgtatgtattcgtttctcttgggtatgtgccttggagtagaatagctagttcatatgttaactctttgttcagcatttgtttttctaaagtggctacatcattttaacctttagttttttgttttttggttttttttttgggagtggggtggggctggagtgcagtggcgttatctcggctcactgcaacctccgcctcctgggttcaagcaattctcgttcctcagccttccgagtagctgggactacagacacatgccatgacgcccagctcactctttttgcccagctcactctttttattttagtagagacagggtttcaccatgttgcccaggctggtctcaaactcctgagctcaggcaatctgcccacctcagcagggtttcaccgtgttgaccaggctggtctcaaactcttgacctcaggcgatccacccacctcagccttccaaagtgctaggattacaggcatgagccactgtgccccgcctctctcttttttttttttttttaataaagacagagtcttgctctgttgtccaggctggcatgcagtggcgtgatcacggcttactgcagctttgacctcctgagctcaagtgatcctcccacttctgcctcccaagtagctgggaccacagatgtgtaccaccatgccttgctaattttaaaattttttaatagagatgggggtctgtctgtgttgcccagactggtctcaagtgattctcccacctcagcctcccaaagtattgggattgcaggcatgactcacagcgcctggcctcagtttctttcaagaccatcctataacaccaagttagtttgaggattctatgaatgtctgcttaaagatatccttctgaattctgtgattctcttgaaaggcttgttgcaatgaaaaacaaagtataatgatgactttatgtgaagtatacttttggaatttcttaagcagaagtcctgagacttttgagagtccctgtatttaaacagtaccatttaggcacagttactgcttatgaaatgaagagtagctagatgaatataaaaaatcttactcttacatttcaacccagcattatttgaacccagcaaaattatttctatagtagaatcaatttagttccttattttaagccatgcatatatatctcaaagcaaatttcaagagggattaaatgttattatgtgaaaatattaggaggtgaaataataggagaaagtaaacacattgaaagtaggtatgttcaggccaggcgcggtggcttatgcctgtaatcccagcactttgggaggctgaggcgggcagatcacgaggtcaggagatcgagaccatcctggctaacacggtgaaaccccgtctctactaaaaatacaaaaaaaaattagccgggcgtggtggcgggcatttgtggtcccagctactcgggaggctgaggcaggagaatcgatttaaccctggaggctgaggttgcagtgagccgagattgcaccactgcaccctagcctggcaacagagcaagactctgtctcaaaaaaaaaaaaggaaagtaggtatgtttacaatttaaaatctttgggcatggagataagctataaggccattgatcagaatggaccatttcataatgttccaaaaattagactactttggaaaaaggtggtgtgtggtcttaatgtaggcaatgcacatgtgtgtttaagtttcaaatacagctaaggagctaagtggaattttttttttttttttttaccaaatagcgtgtattaataatagctcagttccatttactgatttgtttttcctttgtttatgtcatatattatctttccaagagattgtgagtttatgctactgccaatttggtatgagggcctgtttttaaaagagctgcatgatattcacttggatgtaccacgatttattcaaccagtcttttctttgtcattagacatttagtttatttaaagcctttcaacattataagtaactgtgaaagatatctttgtgctatgagttgcctacattttggatcattgccactaagaaagaaattaactagtgactcaattattccttgctttttttgagcaaaaatcatattaaaaataattagatttaaaatttttggttaaattatactttaaagcaaagatccttgccatttagatctagtttggtattaaatgagaacggtggttctctactgtgttggtgggggatatgttcatgatggattttgctgtggaaggacatttggcaatgcctggagagagttttggttgttacagatgcagggaggggtgccactgacatctaatgggtagaggccagggatgctgctgctaaacatcctgcaatacacaagacagtccccacttgcccccccccccccaaaaaaaattagctagcctaaaatgtcagtagtgctgaggctgagaaaccttggattaacaggtttcactgctgatgggaaacttttttttttttaacagggccttactctgttgcccaggctagagtgcagtagcaggatgctagctcactgcagtcttgaactcctgagttcaagcaatcctcctgtctctgcctcccaagaagctggaactacacatgcacaccaccatccccagctaattaaaaaaattttttggcagagctggtgtcttactgtgttgcccaggctggtctcaaactcctaccctcaagtgatccttccagctgggcctcccaaagcaccaggattgcaggtgtgagccactgtgcccagaggaaacattcggaatctgtgatagaaggggaaggttttagctccagaacacaagtagagctggctttgccttatgtgatagacctagtgaatagctcagctgtctgctttcctaatgccatttagacagatactgtatattttattgcttatgcaatgtgcttataaaattgtttatttttgtgtcttgggtattcctgaaaatgcctcatcagtgtcagatctagttgctgttgagatttggttttgctgcgtatattacagacctgatttagctacatgggaaagaaaattaatcaatagctgatttaacaaccaggagtttatgtttctcatgtgatatgaattctggagagagacttaagggctgttactgtggcttcttgatgtcacccatgactcaatgctggtatttctgcttacctttcttaggaatgtgcattttaccttgctgtcacaggatggctcctgcctgttcccacccctcacccccggcagcaaaacctatgttccaggcaggcagcagtgaggacaaaggtacctggagccagtcctctttgtcagcgttttcctgcagccccaacccagtggtttctgcttattcccattggccagactgtcacaggaccttagaggctgggacaaatagttttcagctgggctcattgtggtctgaaaacaaaagcagttacctttagtaagaaagaaaggatattggggctgggtgcagtggctcacgcctgtaattccagcactttgggaggctgaggcgggcggatcacttaaggtcaggaattcaagaccagcctggccaacatagtgaaactccgtccctactagaaatacaaaaattagccaggcatggtggcgcatgcctgtaatcccagctactcaagaggctgagacaggagaatctcttgaacccgggaggtggaggttgcagtgagctgagattgcaccactgcactccagcctgggcaacagagtaagactctgcctcaaaaaacaaaaaaaaaaaaagaaagagaaagaggatattggaataaacgctaatatgcacctttgggagctgctttttgaaatattggttcttgtaagttcactgaaattttttttataaagtagaacaatattggagatttgaaagaatggactcaatgcaagagatcttattagctgagaaaatgtatttatgttatgaatgtatttcttaaccccaagaacttggctgttgtattgtgttttgtaaattttaaatctccctactactatactgggggccttaccctcttttgtatagtgcacacaaagaagtgtgtttctctgggctaaaaatagaaatctgcacctgacagatggccttaagtgtggaaaatgggtgtgtgtgtatcacagaagtggaagaagtggagggagtcctgctctgcctgttgttttaagcctcccctccctgcaaatctatatctttcctatacactagtaatggtcaataggtttttgttgttgttgttgttttaatcccatttacagtagcgacaaaacttatcaggtatctaagaataaacctttattatacatttatgctaacctttagcatacctttatgaagaaaactacaaaattaattaaaatatcatgaacggcaatgcaaatggggagaataaataggggacaacttgccttccagatgcattgattacaaagctgtagtaactaaaatttgatactgtctcaagggcaagcaaatgcttctgtgaagtagaatgaggatctagaaacagactcctgcgtgtgctgaaacttggtttatgatagagcaggtgttactgataaatgcagaaaccaataaatggtattaagtcaattaactttccatttggaagggataaaattaaatttctcttccacgtgcaggctaataacagtgtcttatatcttgcaaaagtacttaccagtccattcacttccagaaaaatggagaagtttcatattagaaatttgtgcatcatgtttcataaataaaaacttcagatactcggctgatggtgttggctcaaacctgtaatcctagcactttgggaggctgaggcaggtagatgacttgagcccaggtgttcgagaacagcctgggcaaaaagtgagaccctatgtctataaaaacaaataaacaaaatggcacctaacttttaaaatgctttttcttacatgtaataatgtgagcaaaagcataatttaatttttcctattaaaatgctttttttttggtttctgttacatttctgtatttacttgaattcttagaacactgtttcctgggagatcaaacctggccattctggatacatcagtagtgagagcttagtgcggacatagccttacagaatgtcttctatgttgaaatgcagagaacccgaaggcgcctaggatgagcctcaggcctgctggttgttgcagtggcgcaatctcagctcactgcagcctccgcctcctgggtttaagcgattctcatgcctcagcctcctgagtagctgggattacaggcgctcgtcaccaggcttggctaatttttgttttgttttgctttttccgcctcactctgtcacccaggctagagtacagtggtacgacctcggctcactgcaacctcagccacccggtttcaagcgattctcctgcctcagcctcccgagtagctgggattacaggtgcctgccatcgcgcctggctaatttttgtagtttcagtagagacgaggtttcaccatcctggccaggctggtcttgaactcctgacctcgtgatccacccacctcggcctcccaaagtgctgggattacaggcatgagccaccgcgcacagcctaatttttgtatttttttggggtttttttttatagagtctcactctgtcgcccagactggagtgcaatggcacgatcttggctcactgtaacctccacctcccgggttcaagcaattcttctgcctcagcctcccgagtagctgggattacaggcacccatcaccacgcctagctgattttttgtatatttagtagagacggggtttcgctttgttggccaggttggtctcaaactcctgacctcaggtgattccccgcctcggcctcccaaagcgctggtattacaggtgtgagccaccacacctggccaaatttttgtatttttaatagagctgggttttcacaatgttggccaggctcgtctcaaactcctgacctcagggaatccgcctgcctcggcctcccaaagtgttgggattacaggcgttagccactgcgccaggcttgttgctgaacatttatggctctagaaataattttttttttaaggagaagtaatgacaaacatgatagaaataaaatttgaggatatttctgggttcaaaataaagtaacagttaaatagcgtgaacatgaagaaataaatattttcaggtagaaactccaaaatttaggtagatgctgtgagttttagtcagaatttgaatatgatgtggctgaccatagatacctccattgcattaattctgcttcataaagtgtttgatgcttgcttgtaggtgttgaatagagcctaattagcagtaagtaaacagatctagagcacagactttggcatctgaaggaccttggttcaatgctgggactgccacttactagctatgggatctttggtggatttttaacctttgaaagcctttcatccctcacagatataatggggaagaaaatcgtttccattagtattgtgaggattaaatgattaattgatgtaaacaatgtgctttccatagtacttggcatatcataagtgcttcatgttattttacgctggctgggaagataagttttgctgtggagaatttaagagggatattaaaatatatttttgttattttaaggaaattcgaaatgagtcccatgactatcctcatagagtggccaagtttccagaaaacagaaatcgaaacagatacagagatgtaagcccatgtaagtacttgtgggtttgtgtgcatgtgtattttttggtttgttttaggaggcaggatgtagtgaaaaggagggcttggggtcagtgttgataaatacagtaatttttttcctatttacgtaagacacgttctttaagaatttaaaggtgtagaatagtggaaggaaaaataattacccataattatttcatccttcaaacataggcaccattattttggtgtatttcccacaacctgtttttcttatgcacagttttcctttctttaaaataattgtaattatagatgtctatataatatccatatgtatttccttttcatatcattccatcccctttgtaagttttgcttaaaatagttattggtgtagtttggtttttttccttccccaagttataagagtagtatgtactcgctgtagaaaacttagaaaacagagaagagtataaggaacaaacttatttaaaaataaataataacttgggtttatattctttggagtttttaaaaataaacatgtactttaaacggaaaattagaatcttgccacatactcatttgtagctcttttcttagcagtacattgtaaacttttttttattataaacaatttttaattgctttgacagtggctttggatataccactcttttgcataagttccctgttgttggacatttagattatgatgtatacacacacagacgcacacaattgtgtgaacaattataatactagagttctttggtgtattcatcatcatgcggtgattttattttttgttctgattcatgcagcttattcagatattaaattgggcctccttcgtgcttcagcatatttccctatgtttgactttagtgggctaaacataggttttctctttagggctccctgttggtagggacttgaaaaacagtatcagattgatcacattctggtttttgcttgttactgattgttcgcctgttgactagggtatggtgctgcctgctaagatctcctgtgtaggttgaaccatttcactgttcaaggacacagactgtatacctttatatacattgtagtcattggttatagataagatatttagggtctggatgtaccactgaaaaatccatcagttactggaaaaaaatccttatttttattcttacatgaatagaatgtttttcttatgttgaccaaatacatttccaagaagggtgtattggctgattttgggcaaatcaaatgagaagcagtctctgaaaatctttcatgtttgttataaattactattaaatactatgtttctcttaatgcttttttctttactaccagttagaagtgttcttaaagacaagtagctagaagagtggttttccattttcttcagttgcagcacacttgaagatttgacccacttcctctgaaacaggtggctcatcacggtggcagttccagtgtgggtgtgcgttcagggaatagcgggtgtgggcagtaattctgatacttaggtgcccttcccctgcctccaaatctctgattgagaatcactgagctacagagaataattctctaatgttaccatgagttttgaagacagtattttccagttgtacaccttgctttgatgcctttaattttttaaaaacttttgattttgaaaattgtagatttggatgcagttgagaaataatacagaaagatcgagtatacccctcacctagtttcccccagtggtaacatcttgcataactacagtccaatatcacacctgggaacctgaaacaatacagtccatccaggtttcaccagttttacatgcactcatttgtgtgtgcgtgtaagttctgtgcagttttatcacgtgtagattcctggaatcaccaccacagtctagatgcaaaccagtggagcattcccatcacagggtcacttgcactgcctttctggggccacagtctccttgcttggatcctccttccctaacctggtgttgcctttaatttttatatatttgttgtaattgcaattattggatgcactacactacatttgagtcccctaattagttttatcgaattgatctaaatgggatttttttttttttttttttgagatggtgtctcactctgttacccaggctggagtgcagtggcgtgatcttggcttactgcaaacccctgcctcctggattcaagcgattctcctgcctcagcctcccaagtagctgggattacaggtgtgcaccaccatgcccggcttatttttgtatttttagtagagatggagttgcaccatgttggccaggctggtcttgaactccttacctcaagtgatccgcctgcttcagtctcccaaagtgctgggattacagtcatgagccaccatgcccagctgataattttattttaactggaattgagatgttttattttaaagtaaaaacatttgcaacttaagttatcctcaagtatatacatcaataaaacttatgatttttctcctcagcttttagacttatgttgtatacctgcagttgaaggctgcagggagactctttaaaatatgcgttatcaggcctccctccatcatcattgggaccaggctcttcctgtatgccttctcattgaaaagcacttagccttgagagaaccaagcttccctcctgcggaccatgcagtggttgtcctctggagctgtgctctgctgggagcagcccccagtgcatgttctccttactcttcttcttctttgccccctccctccccacacatgcctccctagtaagccatgttctcctgatctctcagaaagagactgctcattcttgcttctcacgtagccacaggattttctagtctgagccaatatgcttcagcctgcaaatggaaatgatctcttccaaggcttgtgctggccagcacatccccacaccgccttggcacctctcctctcctgacttcagtcattcactgtctttctccttaccctctccttcccaccttcctcatcctgggtgacttcatgtctctgggaaagaactacggctcattgcgctagagttcctagacctgttcagctccgctgacattgacctttagtcatcttcacctctgaaatctgaaactctgctgccttgagggctactttctgtcattccagctttcacttgcttactcccactgtacctgctctttgacttcagcaggatctttagttgactttttcatgtattgtgaagttggaaatgtattgaattgaaatttcgattaaaaaatgtagtgaagcatattactttgtcctctaacctaactattaataactttcttgttgtttttatatttaaaaaataactctggattttttaattccaccattttgtgaagctccaacttaggaaaaatcagtcattcatcctctctgcactttgggcaaatgagcgtgtgccttgggtggactccagtgttaggtgggcttggggttgccttgctgtcctcatgccctcgtctgccccactgccaccgtgttccagctctgcaccgagtaaattatctctcagagctcctcaccatgctcaggatatcgtcctgctttcaattctacagataaaaattgtaaaaatcaggaaacaccaccttagcttcatgttctatcacctggaaactcactttcttttgcccctatccttccctaaagtcccaggagagaagcctcccctccctctgtcctagccgaatccttcgtccccatcctcctcatgggccctgctcttcatcatcactgctttttgtgtgttttcagcctctttctatctcataacttcttctcttttgtataaatatggttcgctctcttttgtctcaacccttatatcctaccccagcccccacttcctttcttacctacatggatggacatttcttacctgtacacaggcttaaaagaatcaatgtgccatttgtctctccaccctccccaccatgcacacttcagcccatgcttcttctccagcctccccactgaaacttattctaaaagcactgtagctgtagttgtcaaatgcaatgagagactttccactggtttccttctctgtgacttttgacattattctcctgcttcagcctcccgagtagctgggattacaggcacgagccatgacgcctggctaatttttgtaattttagtagaaacagggtttcaccatgttggctgggctggtctcgaactcctgatctcaagtgattggcccacctcggcctctcaaagtactaggattacaagtgtgagccactgtgcccagccgaccgtgccttttttcctaaccccgtaatttttctgattttcctctttggcccctcccctattttcagggtgtctcctcctcactttgcctttatttcttcaggagtctgtttctctctccttctcactgtaacacttggatgaatgatctcatctgctgtgggcctagtttccatctctgcttataaccccaaatctcatctgcagtcgtggacttttctgtctacaggtctgtgtatccaagtcatcatctctgtctgggtgtcctgtagccacctcagactcagtatacactgagtgagtgttcctccctgacacacttcactggccttagccccacacctgccttttctccttttccccatgtttataagtggtgccgttatttacacattttctgaagccagaaacagattcttccctcattcatttcccacgtcactaatactaatttccatttccatgatgtattcctatttctttttcttttttctttttttttttttttcaagacagggtctggctctgtcactcaggctggagtgcagtggcaccgtctcggctcactgcaacctccgcctcccaggctcaggtgatcctcccacctcagcctcctgagtagctgggactacaggtgcatgccaccatgctgagctagttttttagattttttgtagagatggggtttcgtcatgttgcccaggctggtctcaaactcctggactcatgtagtccacctgcctcgacctcctgatgtgttgggattacaggtgtgaggcaccgtgctcagcctccgtaatgtatttcaaatctgttttcttctctgttcacattggcttggttcaggccctactacgcttttcctcgtcattacagtagcctccaaacccatctccttgtttcccttctgttcccacttcagtccattttcatggtatctggagtaatctttgtataatgcaagtgtgttttccactctcctctctaatagtgctgcacaatttttatgaaaaagttaaacttctttagcattatcatactgggctttttggagattgacccctttacacacctctctaaatcttttctacccattttcctagaaattattcatttcagtaaaactgaatcacttggagttcttctagcgtgactggtttttaatacctcagtggcttcaaatatgtcattccctttttgaaatattcttcccctcctctctctgacccatctcaatcaaagttctccttctgcaaataccagctcaacaacctctttcccgtgagtggtattctcatccagtggaggtggtggttctcgttcactaagtccagaggggctcaggaatgtgtattttttaaaagctgggatggtgttgctgtaccttttccaactgatagtcattatgtaatttaaaaatgtgtttctggctgggtgctgtggctcatgcttataatcccaacactttggaaagctgaggtaggaggattgcttaaggccaggagtttgagaccagcctgggcaacatctctacacagaacttttttttaattagctgggacgtggtgatgcatgcctgtagtcccagctatttgggaggctggggcaggaggatcacttgagaccactaattcaaagctgcagtgagttgcaatggcaccagtgcactccagcttgggtgacagagcaagactgtctctaaaaaattttttaaatgcatttctatacatagtacttgacagttgctgatttggttcagaaaacatttgttgaaaaccagctacatgtttgatactatgctatgtatcgaataatttatggtatacttgaggagattaacacataagcatgttacagatattgtaagatatgacagtgcattgatggagctgagaagaggctctgcccaaggaggcagggatggcttttaagaaaaagaatggtagcctgaactaggtaaataaaggggaatggaaaaagaattttttaaaaattcagagtcccagatctttcttttctagatttggattcagccggtctggaaatgtttatttttaaacaatcttaacatgattcttttacactcactatggcaccactcctcagactgacatatggaaactacatttggagttctgaatacgagaaacataaaggaaaaaggatattttaaattaggaagaatttgggctgggtgcagcagctcatgattgtagtcccaacgctttgggaggccgaggagggaggatcgcttgagcccaggaatttgagactacagtgagctgtgattgtgccactgcactccagcctgagcaatgtgagaccttgtctcaaaaaaggaagaaaattgaaaggatttgaagaggtccataatctgctacaacctagagatgcctcagttgtctcagttaactgtgagacattgtagaagagatggacaagaacttcgttgtttgaaaagagagtagcttgtaatggttactttgggaaacgtctttatactattagagactaccaccaaattttgagatcttcctatttgcagtacaggtagaaatcccagtttactatttggtctaaaagggagtgccagcaattgagtcaactgtcatgtcttttcactggccatgaaacaatctgtgtgtgtgtgtgtgtgtgtgtgtgtgtgtgtgtgtgttaaaaacccataccataaatttcttgtaggtgtatattaacagtattgttaactgtatgcacattgttgtacaatagatttctggaacttttccatcttgtataactgaaactctaaatccattgaaaaactccctatcttcctcttcccccagcccctggcagccagcattctgctttctgtttctatgagtttgattactttagacactaaatatatgtgtaatcatgcagtatttgtctttctgcgactggtttatttcatttgacatactgtcttcaaggttcatccatgtgaaacagtcagattttaaaggaaattaacacagagactcatgattctggtagtgtcaggttacatagtccatggtttgttgctctacaaaacaaaaagattctcaaataaacatactttttaaatgagttactagagggggaagaaggaagggaaaacttctatgctttcggcacgctccctgcatgatcttagcaaatggcataactactttgaatgcagatgtcagtatcagctctgagatttgtatgcagctaataaagtagccccaagatgtattaagcaaaaatgaatagaattttggggagaaattgacaaatccatgttcatgggcttcttaataagacaagatatttgtaaagaaatagatttatataatattattcttttttctttttttttttttttttttgagacggagtctcgctctgtcgcccaggccggactgcggactgcagtggcgcaatctcggctcactgcaagctccgcctcccgggttcacgccattctcctgcctcagcctcccgagtagctgggactacaggcgcccgccaccgcgcccggctaattttttgtatttttagtagagacggggtttcaccttgttagccaggatggtctcgatctcctgacctcatgatccacccgcctcggcctcccaaagtgctgggattacaggcgtgagccaccgcgcccggcctatataatattattaaccttaatataagaagaaaaatacatagaaccctatatccagcaattagaaaatgcacatttttctaggactgacatggtctatttgtaaaaaatggaccattgactaggctgtcaagtaaatcttaaaatttaagaatgcctggctgggcgctgtggctcacgcctgtaatcccagcactttgggaggcctaggtgggtggatcacctgaggtcgggagtttgagaccagcctgaccaacatggagaaacctcgtctctactaaaaatacaaagattagccaggcatagtggtgcatgcctgtaatctcagctactcaggaggctgaggcaggagaattgcttgaatccgggaggcagaggttgcggtgagccaagattgtgccactgcactccagcctgggcaacgagagcgaaactctgtctcaaaaaaaaaaaattcctatcttatagctcataattttttatcttaatgcaattaaaatataggttattaataaaaagataaacatttccataaatttggaagttttaacatttctaaatcgtgggtcaagacaaaattataatggaaacttaaaaataaacaatatataaaatactgcttatcaaaacttgtgtaaaggagctaaaacagtactgcaatgaaaatatattgtcttaaatatttatattatattttatttattattttttagatggagtcttgctctgttgcctaggctggagtgcaggggtgtgatctcagctcactgcagcctctgcctctcgagttcaagcaattctcctgcctcagcccctcgagtagctgggagtacaggcacgtgccaccaggcctggctaattttgtgttttttagtagagacagtttcactgtgttggccaggctggtctcaaactcctgaccttaagtgatctgcctgcctcggccttccaaagtgctaggattacaggcatgagccactgtgcctagcccagtattttaagatgaaagttaaaattaatgtgctgtctaacctaatttagagtaaaaataagagaatgagaaaaaaaaagcagaaagaagtaacaacaacaaaggagcagaaatagaaatcacagttacagcacaagggaccaactaaactaaatgttagcctcggtaagactgatcaactctgtcaagatcgagcacgatcaatcaaacaagaaagaaagaaggtgcatataaacaatatcaggagaaagagtgggcacataaatacaggtatacaaagaaagcgtgaattgaatactgccaacaattttatggcagtaaatatgattttttagaaaaaatggaacagattcctagaaaaacataatttaccaaaactgactcaagcagaagtagagtctgaagagtccacttaaagacattaataaacaaaatccacaaagaaaacactgggccagctggttttaccggtatgtttcataataatgcaagtgaatatagatgtagaaatcctaacaaaggattagcaaactgaatatagcaatgtattaaaaagataatacattatgttcacattaagtttatttcaggaatgtaagggtagctaacattagaataccttttttattttttatttatttattttttgagacagggtttcgctcttgttgcttaggctggagtgcggtggcacgatcttggctcactgcaacctccacctcccgggttcaagcaattctcctgcctcagcctcccaagtagtttgtattacaggcgttagccgccatgtctggctaatttttgtattttcagtagagatggggtttcaccatgtttgtcaggctggtctcgagctcctgacctcaggtgatccatctgcctcggcctcccaaagtgctgggattacaggcgtgagcttctgcacccggcctagattattttataattcaccacagtaacaaaggagaaagagccatatgattatctcaataagtgtggaaagattatttaaagtccttgctgaggattaaaaatgacacatagcaagctagaaatagaagggaacttctaagatttctaagagataactgcaacaacatcactcataatgatgacatgatgaaagcattgttttaaaaaaatattgggaacaaggtaagtgtgttcattcttaccacttatacttaacattatacttctgtctccctgaccttatactctaggtcctagttagtacagtaagcaagaatgagaaataaaagccataaggattggaaagaaataaattaactgtcttttaatctgtttatgaggccactatagaactttcatagccaaagcaggaaggttcagtaagaggaataaaagtataaaagttttatctgttgctatataacaaaccaccccaaaacagtggcttaaaacaataggagacatttattatgttcacaaatctaggggttgactaaccccacataggtgattcttgctcaaggtcttttgtgtaattgcatttcaaatgggggctggggctggagtcaccttgaagaagcaacttctttactcttgttgactgtgacctcaactgggctgtcaccaggaacacctacacaaggcatctctatgagacctggactttatcacaaggcaactgagtttcaagagtgagcattcttagagagcaaggcagaagcttcattgccttttgtgacctagccttagaagtcacatacaacttccacaacattccgtttgagaagtaactcactaaggccatgcatgttcaaggagagggtacttaatactcttattagtttgatggaggaagtatcagtgaattgtggacatattttaaaaccatcaccactatagatgatacgaattgcttcgtagataacccctctagaaatgtgcagacaagtcaaagaattattaagaaacattttgatagtcttagaattataagatgatagaccttcaaatcattaaaaagaaacctttaaacttaccagaaagtgcttgtcatctttcttagtaatagcagatttagataaaaacttagttctataataataatccgaataagtatagatttaagttaaattttatggtaactattatgtaaatatttgctaacattttttcttatcccattaaagtttgaaaataaagaccagatgtcagtgtagtgctttaccttctcaaaatccgttgttgacagcttttttactaaaagattttctcactcactgttagggtctttagttctatcttcaattttttttttttttttttaaatattcagttttggcctagtgcagtggcttatgcctgtaatcccagcactttaggaggcagaggtgggtggatcacctgaggtcaacatggtgaaaccccgtctctactaaaaatacaaaattagttgggcgtggtggctggcatctgtaatcccagctacttgggaggctgaggcaggagaattgtttgaacctgggaggtggaggtgacagtgagccgagattgcgccattgcattccagcctgggcaacaagagcgaaaaaaaactccctctcaaaaaaaaaaaaaaaaatctttaattttaatcaaagccaaatcaaagctatttatgatgttaataatttattcctgcgggctattgatgcactggagtggttccaaggaagaagaactagaactcttagagaagaagctagcattgattagacagggaaagagaaaacctaaacagagcagcatgatagctgactttagatacctgaacttttacatggaaaaaagagttctttatcctgtgttaagcccaaaatatagaactagggttcatgagcgaataatagcactggtgaatatcaggttagcattagctcttaagagctgttttaaacctacaaacgaaccctctgaactagtacacttgttattggaggtattcacgcagagggtggatcttctcactgtcagatcttctagagaatatttgtgaatgaattatagagggttgcattagattactttggtctatttcttgtatgcttcatttcttgcccctgttcatctctttctcaccaatttcccgcattcacctttctgtcctattacattgtgaattccttaacagatgaaactttttttttttttggactgacaaaaatcttgtacatagttttgtcatagggtagtaaagagagtattaaagatatcattaagtttctctttctctgtccctgaataattaaatctataaagcacttggggttgggcccacatgtggaaggcatgtgagtaaaggtggtaatgtccttgaaaaagaagcctgtaatattgggttagcattgctgtatccaggtatgaatgcatggttttcagtgagtatagatacacagataaatatgaacataggtatgtgtatatacctatatttcttatccctgtccactgggaaatcttgagagcagcgatagctgatgagccattgggcatgcttagcttttgataccaaattttattctccactaggaggagaatagagctttggagaaatggctggttccacgtctgcgacagggaaagtgtaagaatagcctggaatgtcttgtagtgacagaacataaagacatgcccaaaaaatgatgaagacatatcagaaggatgtagaagccaagctgagtccactggccaaacctgggataatctgagcatgaaaataaataatggttacaacctattgaataaaataggaattaatgtgtctatactgatgtaaagaaacaaatgaatacataaatgagggatagggaaagttctacctttgtataggttgccaactaataaatattgaaatggatactaaagttggtgggtgaaaatttggtgaagaacaaggtatttacataatcttgaagtatccctttacaaaatacttattaaatataagaagaggaatagtacctctacactggagaagtctggccaacaccagccttaaatatgtggtcatgaccagtcatgagatataccatgtcagaatcctgaaccacccgataagatgcagtgaatacttagcatctttctgagatgaacatgccaaaaatatacaaactgaactcatctatagggaaatagatatctgacaactcaaatggaggaacactataaaacaactgacttacagtttcaaaaggttaaaaaataccgtgaaagaacagattgtatccttttgtttaaaggacattattgggacagttggtagaacttgaatggtgtctgggttagtaaagtatcactgttaattttataatttcgatggctatactatgagtaagtaggattatgtcattgtagaagataaaaaaatggaataatcaggtatgtttgcaacttgctgtcatgacttgggaagaaaattctttgtgcttggaatttttctgtaagttttaaaattatttaaacatacaaattaaaaatacatataaacttgaggtactgaatcctagccagtacatgaagtcaagaaaaggaaataaaaggcatacaggttggaagggaagaaataaaaatgaccttattagcagatgacatgtagaagattgcaaagaatctacccaacaatgtcctagaactaataagtgagttaaacgaggttgtgggatacaaggtcagcatacagaagccaattgtattcctgtatattaacaacaaacacgtggaaaccaagattaaaaacacattgttgtttacagttgctctaagaaaatggaatatgttggaataaatctaacaaaatacatataggatctgtatgttgaaagcaccaaacacatggataaaagaaatcaaaagatgacctaaataaatgaaaaaggcctaccatgttcatggattggaagacttagcatagtgaatcagtcctccccaaattgttctatagatctatagtgactcatagtgtcaaattgttcctaaagatctaacacaatttctgtcagaatttcaggaagtttttttgtagataaaaacaagcttattcttttatgtggaaaggcaaaggaactaaaataaaatggctaaaatgatcttggaaaataaaaactagaagaatcactctacctagttttaaaacttaatgcataaccacagtaatcaaaacagtgtggtagtggcagagggataaatacataagtcagtggaacataatctagaaatagacttgtaaaaatatggtgaactgattttttgacaaaggtgcaaagcaatttaaaatgaaatctcacaccttacacaaaagttaactgaagatagatcatagatggatcataatgtaaaagctttcataagaaaatgggagaaaattcaggatgtaaggctagatgaagagttcttagctatgacacctagagcacaattcatttaaaatatcaataatttatactaaatcgaaataaaaaacttctgctcctcaaaacaccctgttaagaggacaaaaagatgagtacagacttggagaaaatgtaaaccacatatctgacaaagaacttagatctggactatatatagaactctcaaaatgtaacagtaaaaagaaacaaaaaccccagttaggaaatgggcaaaagatatgacacagatggcagataagcctatgaacatataaaaaacttcattagccattaggaaaatgcaaattaaaatcatggtggtgggatgtcactagacgcctactaaaacagctaaagtaaagagatcacaataccctaaaaatgcagagaagctggatctcatatatgggtggtgggaatgtaaactggtatagccactctggaaaatagtttggcagtttcttaaaaagctgaacgtatacttagcttatatgacccagcacttgcactcctgggcatttatcccagagaaatgcagtcataatgtccacacaaaagtgtgtgcatgaatattcacagcagctttatctgtagtagccccagattcgaaacaacccacatgtccttcagtgggtaagtggttaactatggtatattcataacacagaatactactcagcaataaaaaggaagaaacttgacgtaacaacatgggtagctctcagaggacttacgctgggtgaaaacaatccagtttccaatgatgacatagtacatgattccatttatataacattcttgaaatgatgagaattctcgagagggagagcagatcggtggttaggggtggaatggggaagagtgtgcctgccaaggggcacacagaacctttgtgctgatggaataggtatgtgttgttttggtcatgtgaatttgtttgtggtaaaatggcatagaactgagcacacacaaatgagtgcctgtagaactggagaaatcaaaataaggtctgtggattgtagcagtgtcttttcatgcttctgagtttgatggccttctggaactaggccctggacagcgcattgctaggagtggggctctgtggtgagtctgacagcgtccctggctgcaaagagcttaactgtggcaagaaggctgctactgggtgcctgggtgctcctgctgccctccaccagcggagctgatcagaatcttgccctaagaggcccctcttaaaagccacagcaccttgggtgggctggtctgccctagagcacttacgctgggtggagggagctgtggaagcgtgcagtgggggagtgctggagtccaggacagtcagctgtactcgggattggggtgagggtgtggttgtttctagattaaaatacagatacatgatcaagtagaattctgaaattcctttaaatgtttaaggtaaaataggaattaccaaggaattttgtactttaataccctcttagggtattaaggagggtttgtcagtgaaaataatcaagaaggactggtccattcgagccactgattttgacagacaagaaaacagacccctgagtgccccttatcataggactgtcggcgactgggatgctgatagtgtttctcaagtagtagtcacccttttctgggaaatcatgactacgtctggaatcatgtaggttggtagagccaaaagagagatcagaatccacatctttagatccctcaaactcccctcacccatgtttttcatctgcgtcgcaaaattccaggtacctgtactaagaagtcctgaaggtttctgcgcttttcctttctgccgaattagtttacgcttaagaaagtcagttaacgtcatttcatttcctgcttatggttcagaatgggttgatagtgatttgtcattctaacaaaattctagcaggtgtaggaatttgaatatgtgaaaatcttctggaattcatcatataaacaatgtttgaatacttgctgacttaaattgttatgacactctactaggtaggcccgctgagaaaatggaagtagcagtcctttttccctgacagtcaaatttaggagaaatgaatcagtacaggatttcttgactctccgaacctaaactgcagactgctcctctccgctttgtccccgtggctccagccacattcttcatgtccctcagacatgttaggtatgtaccaccttaagtcattcgccgttctctgtgcttggaacactgttaactaaaatatccgtgagactgaccccttccacatctgtgcttacatgtgacccacctgggtggtcagccacaaggcccatcctgaccaccctgtttagaattgcaacctgcccctctccccagcgctgtgagtcccgttactcttttttcttagcatttattactcatatactttacttagttatgcttattgctatatcaccaatatagatatttggtccgcattgtttgcatggtgtctcatgggcctttggatgtgatgaaagttaaatcttttcccctaagtccctccaccttcaatttgtttaggctctaactctcctagaagcggagagtctgagtttcaaagaaaatggtgcaatactgctgagcgccgtggctcactcctgtaatcccaacactttgggaggccgaggcaggtggatcacctgaggtcgagagttcaagaccagcctgaccaacatggagaaaccccgtctctgctaaaaatacaaaattagctgggcgtggtggcacatgcctgtaatcccagctactcaggaggctgaggcaggagaattgcttgaacccaggaggtggaggttgtggtgaactgagatcgcaccattgcactccagcctgggcaacaagagcgaaactccatctcaaaaaaaaaaaaaaatggtgagatacttactgattattttaaagtgaagattagtatgtcttattttatacaagctaccaaagaggaaaaatgtctgttttccaaactaatgaattttacctattttgtaaagacatttctcaggtattcttttcattgcagactcttggggacagattaaagaggactttttcaattaggagatttgtggaatcagaatttaattagtgacattgtcctgtcaagtttaggatcttgaaatcatgatgggttgaaagacgctgatgatttcaaggacagtaaactattgtttggaaaaggttgaacttaccaaatgtttcctaaacaatgtatactttattagcaaagctgtgatggtgctaccttggaaatactctttacattcccaccgccactacttgattcaggcctcatcaccttttgattacgctttcagtgtattggtgtatgaagttgccttcttcttggttcagtccatcttctatgctgctgagagttattttcatgaaaatcaaatgtgtttataccagtcctttaaagaacttcactggggccctgtccagagcctgtgcctgtagcacggcccacgtgcccttcagggtccgcccttaatgtgtctggggagccctctctagccagctcgccagcctttctgaatctgccagtcctgccgctacaccattccctttcattcctctttatgatgtgccctctgctggaatttccccttcctgctgatctcactaggcctattcaggtagcaactactcaagctccttcccacaatattttatgcaataaagtatcagtactcagagtcacggcttaatataatttcttttttcctttttaaaagcttcaaacaaataatgtcttacctttagatccctataggttaaaatatgtttgttgactaaaaattgtgtatgattgctgaaagtattcaatgcagggaacagaccagttcatcatggaggcattccatcagagcgtctagttagagaagatatgtcatggactgcatcggcacagaagtggggtttatgtgagagaggagttggaagtcacacctgagtggagagcaacgtgaaaaggtgatgtcagcaagaatttaggatgtatggaaaggatggtaaaggcaccaactggatggatcagggagacatggaatgcagaatgcaggaaataggtaatctcttaaattgcacaaatctaggtttcatttttgtgctctagtgtgttacacttgtgatgacttgacttccctgagtgacagtgcgatgggtgtgatccatattcatatgcacttcatagggctgtgaggactgagagaggtgacccagtgacgagtgtcacacaaacctgacatgtcgtaggcaccaaatggttctagacagtggttctggttggttttgtggtcaattggaaacctttcatcaagtagaattttctttgcagagcaaacaattgaaatgttaatattctatgtgtactaaagtttgtattctccattaatatgggggagtatatggtgacctggtgtttagtgccagctttgtttttggttcattgctcgatttatgagagagaatgcataatatttgttgttcgactattttacttgcaggattgaagagagttgacaaatctagaaaatgctttgagttcttggacatcactgtttgaaaacgtactgattacccttagttgagaatgggaaaatctaaaggggaaaagtcactggttcacgctgtactattagaattggtcatcttcttgcctgacttgtaagttaaggatgcttgatctttgctgtgatttaacctgttcaggatgaattgtaaccagttacaatgaatacaaattctcctttctgtttgacctggaaaactttccaaaaggagatgtctttacaataatgatatatttggtgaaagctgtgggttgtttttttttttttaaagcttatgatgacagtattgaaagaggaaactaatctgtattgtcagcacagccacagctagcactagtcatttcttgagaggtggagctgtttctcagaaaacatgctgtttgagggtaggaggtgaagggactccttgtcagaaattggcttaattttaatccaagttataaaccacagttctgtttgggtattgcatttcttcatttactcagtgacaagaattaaggcagatgatgcctgtagaaaaaaaagtgtatgttcttgatagttctgctactagtgctagtagaggttgagaaataagatttcctgtgaagtgtggtttggttgcttttgtggtatcccatgcaaaagagtttgaactatcttcatttttctccctttactggatcctttaaaagaggaaagggtgagataaccagacttacaaggatggtaaagtatagtgggctttggggcttacttatacagcccaaaggttatgggatgctgctgttatgataatctcatgtcagaggttcctatggaagaggagaaaggatgtacctttctgtgtgttctcattcagaagtcaaaagtttgttttttaatgattagtttacagatttggggctgactgatagtatctgggcagggaaaagagacctgtgactcaggttgttaagggaacctgtgtatatgctctcacaaactcgaaaccgtgtgttgtgatccttaattggagaagaggtagtgcccttctttgttatcatcactaaagagtataaattataaagtcacagtttctcataaagaggctttgatagtttcacttcctgaaatgtgtatattcacaatcttttgcaatagttattttaaggtgatgtgttttatttttttctctactgcctcttcgaaatcaaaaagttatatatactttttattttatattaatctttttcaatttttgtttttataattttaatgtattttaaatttattttaaagttttatttctcctttttgctttaatatttcttcctttttaaattgtttttcatttttcctttgtatgtgtttttcttaaaagaacagaagaattaaaataatatctagtgatgtaggtatttcagttttgtttttaatcagccttgagaagaaaatacaggctcaaataacatttgtagtcagttctaaatagctatagagttttcccaaggattacctttcttttttagtattatctgataacaaaataaaaaaaaattttcctgagaaaattcaccgttcctttgcttttgttgactctgtatattaatgttaaacaggaagcgaggccactgccaggggctgagccctgcagacccagtgccctgcaggtagtgccctcctccctactgcctcccaggactggatctgggcttttctggtgtgtggttactgtgcttatagagcattgaggtaacacctcgtgcatattttacagatagaaggaaaatagcagtgaattttagttcagagtcctgagggtgaggtatcaaatactctggctgaaggtctttctctaggtttacttcctgcatagctgggcaagggtgtggggtggtgccatgtggggtaaccagattcccagcaccctgtgaggtggaccttcccgggttttatggattcctaccgcatgttagctaaatggctgttttcagttgtgcaatagatatgagtagcctttggttagtgttctttctgtgattacaacatgaggaaatacattcctttggtgtgatattttagtggaactttaattttaaaatcatgtagttttctaaaaccaggctttctttttttggtatgttgtctaggagatatgtggtctttattttaattaagttgctgacctttttactattttacataatataacagttaaagggtgattaaactgttttttaaaaaagtgatttttaaaaaaaagtgcttgttgacatcatctttctgagaacactagtatatgtgatttactataacaagatcttagtttttcctgttggcaaatgacatgtaatatttacagaggtcttgggttcagtccagcagaaacatctcagataaattgatgtgtgaaactaaagccattttacattttctttcatatggagataatataaacagttttttcatttaaaagtaaggagagactggctatttagtatggatttctttgagagggacaacttgtaatagtatgcattctctagagttaaacatcaaacaccatgtttttagttttataattcagtgatatgcatccggcagttgtgtgttgaggattctgagttaattcatgggctttttctcctggtgtcatgcttctcttgctttcccatctaaatgtataaggtcacattttgtatttcacatatttaaattagcataaattctcaatctatgagatttttacttttaaaaactagaaatatctctaaactgttaacagagtctaagtagtgaagtatcttcagtggtcttttaaagaatacagttggaatattccaactgtctttaaatattttcagcatttaacctaaacacagttcagtgctaaaatttatttaaatatagtggaattcttatctgttgagaaatgaagaggttgaaatatagtaacctcggaaatctagtctcatctatttgagaccagttatcgttttgtaggtagaccaatcaattcttaggtaccaagaatctgaatgatccttttacttttaggaaggtaagtactttattcatttaactatgtttactcctggtcgatttttcaagtcacaatggctaatgtgctacaaacagaagtgcttcctttccagcactatagtaataaacaagattgcattttatactccttacaaaaaaagtagagaatagtttaggatttgtctcaactctattatgatgctaattcatttttcttatttcttctgtctttttataaatacctagaatattaatatgaagataaaaacagtaattttgaaatgacagttgtggtttatcattctctattttcagatgatcacagtcgtgttaaactgcaaaatgctgagaatgattatattaatgccagtttagttgacatagaagaggcacaaaggagttacatcttaacacaggcaagtaatacgataccacgcaaatgtctgaaaatgatgtgtttgtgcttgttctgctttaaatcataggtaaaagtatatcttgacttcttttggaaatgaaatggtatttcagtttttttctgacgatgtaatgaattatggacattataaggttttgaagctttgagtatttaagataaaaggcaagttatttttgatattacacgttctgtgaaggaaaattcttaggaaatggcttaggccagttctttggcagattgtgttccttacattatatctgacacagagtgctgcttatgcttcttagtgtcttcttttctcttcccataccctgtggcaaaaccagaggccctggacagctcttctgtagctccccctgcctcgcatatatcttcagagagtacaccaagccctggatggtgtctggtcgtcttcaaggacctgagcgggtgctgagaccaggtgctccagaggcccagccacaaggccttgtgctccctgtggccttctgcccagttgcctctgagcgcatcagccacacctgtgtgcaagcatgattcttccttccattctgagatagtaggagagatttttgtgtatccacagctactctttattcatcaagtaataaagacttgattatcaacagggctgtctttccccctaaagatttttaaatattcaaaagatataccataatatttgagatttttgaaaacataacttaaatcagaatgacttatttgaaagagaaaaatatttgataagtaaaaagatatgcagattaatgtaactatgagctattatactacgtcaattcacaggaaactaaaatgcattttttacttgaggtagtacagctcctgcaagtcaaaaagaaaaaaaacagcccatggaaaaaactggcaaaggacataaactcctagttcaaagaatcaaaggtggacactttgcacatgaagaaatgctccattcagtaaccagggaatgggcctttcacctgtcagaaaaggagagatttcaaagtgtataatactcagtgttcaaatactctgaccgaccaagaaagtctacttagagaaatacagtcagacataaagatatatgtgatcggccaggcgcggaggctcacacctgtaatcccagcactttgggaggctgaggcagatggatcacctgagatcaggagtttgagaccagcctggccaacacggtgaaaccccatctctactaaaaatacaaaaattagctgggcatggtggcgggtacctataatcccagctacccaggagtctgaggcaggagaatcgcttgaacccgggaggtggaggtggcagtgaggcaagatagtgccactgcactccagcctgagcgaaagagcaaaactgtccaaaaaaaaaaaaaagacatatgtgatcatgttcattgcagtcttattttaacgcatcagactcaagcaatctgtaagggactggttaaataagttaatcatacatataccattagtaataatttgtggagcttgggaatagagactttaattttccattttattcctttctgtaatattggaagttttttttatgtgcatttgtattttaaactactatttagagttaaaaattttattttctgtttgaaatacctatagttgacccttgaaccatccagggttgaactgtactagtccacttacaggcaaatttttttcaaccaaaaacgggtcggaaatacggtattcatgggatgtgaaatccatgcatacagagggctgactctttgtatctgcaggttctacagggccaccagtggggcttggacatgtgtggattttggtatactgcagtgggtggggggcaggttgggtcctggagccagtcccttgtgtatattgagggacaactaattacattaaaaaatagagaagaattaccaccctagatcccttatcacaaccctttctccctctgtactgttcttctccattatcacttactggttttttgttctcttcttagttcttaaaaacataggtcttaagattctaaattagcttttttttttctcctccagtctgcactacagccctttaagaccatggttttcaacctttgtaacctaagatagggtagactactgtcatggtacctgtgctggaatcttggtgccagcatttcactgggtattcactcacccagcaaagacttactgagacctactctgtggcaggcattgtttaaataaaacagactttcataaaaaccctattatgaattttatgaattttacattataataggaaataataacagttaaaaattttgtaatggtgtttttacatgctttgtataatttaaaccttaggacaaccctctgtggtaaatagtattacctttattttatacacgaggaatctaaggagatccagagacattaaataactttctttttttttttttttgagatggagtctcactctgttgcccagcctggagtgcagtgatgcaatctcagctcactacaacctcctcctcccgggttcaagtgattctcgtgcttcagcctcccaagtagctgggattacaggtgctcaccaccactcccagctaatttctgtatttttagtagagacaaggtttcaccatgttgctcaggctggtctcaaactcctggcctcagatgatccacctgtcttggcctcccaaagtgctgggattacaggggtgagccaccgtgcccagcctcctagtaattgtttttgaacttcttgtcgctgtgtgtgtcctgaaggagccctgcccatttaatgcgagaactcagaagcctgtgtctggctttttcttctctcctgaattcctctctatgtttttcaggtctctattggatatttttactggatttcaaagtctgcatgttctctgtcttttttaccaaggtagctgccttcctatttttctcattgggattgagactgtcctcattgtctgccaagttctttctgatcttctattgcccctcgcttttttcagagctctcttcaattacacctgtcctgttgcagcagctttttaaggtctccccttggcaccatccctgtcactctagtggtgtagtcaccaactacatccctccacttctacctcactgatctatttgtcttttcccaaatatgccctaaactttcatgcactttgccttatgcttggagggcctggagtggaccctaactccctcccattcttctgcattccctctctgtattaggacctttttcgaggctcttctgtagtttccttcccagcctttcctgctccctaagacctgatggtttaatttgcccatactcttgtactacttaactgtgtccattagtcatacaagtacttctccttctacctttgcaagctcttaaagagccaagactgcatctcagtctagctcttggccttgcatctagcaggttgtttggaatggaggatacagaaaactagagatgcagtaacccagctcttctgattgtcctttgtagattgttacttcagtcatctttttcttctgagttttatgaattagtatttttttaaaagtcacctccttggtgtattatgtctgttttgcagatgaagaacattggtagcattgctggtaaatggaagagctgagatgtgaatctctgttcctctgatttaaaaacctatggctgggcgtagtggctcaacgcctgtaatcccagcacttggggaggctgaggcaggcagatcacctgaggtcaggagtttgagaccagcctggccaacatggtaaaaccccgtctctactaaaaatacaaaaatcagcctggcatggtggtgcacgcctgtaatcccaactactcaggaggctgagggagggagaattgcttgaatccaggaggcagaggttgcagtgagccgaggtcgtgccattgcactccagcctgggcaacagagcaagactccagctgtgttcctgtttattatttagtctttagaatcaccagtggaatggcatgggttgtgattgtgtgtatacactaaggagtaacctcactggcaaattgctacatccattttttttttcctaattaaagaaaaaggtattcattttactggggatttcctcattgctgtttttacctttagactgtgttttgttttagaagtagatcaagtaatagaaaaataagttgagtgaggaaaacgccactctcaaatattaggttgtagtttgtcaggatcctcagtagacttctagcatttttacaacttaaccttggtttattcatttaagtaatatttattgagtatctgctacataccaaggagtacaccaggcctaaagatgcttttagtcagctgggcaccatggctgatacctgtaatcccagcactttgggaggctgaggcaggtggatcacttgaggtcaggagttcgagaccaacctggccaacatggtgaaaccctgtctctactaaaaatccaaaatttagccaggtgtggtggcgggtgcctataattccagctccgtgggaggcttaggcaggagaatctcttgaacctgggaagtggaggttgcagtgagctgagatcgtgacactgcactctagcccgggtgacagagacaccatctcaaaaaataaaaaatgcttttagtctagaaccactttaacccccttgttgtatgtgggtctgaagctctgggcagccctagcccccactcctgactctgcccctaactcataccactctgctacattccatgtgagttgaatgcatgttcatagttattttaggtgtagcaaaactacatctcattttaaccttctcatttaaaactcgttaaaatttgtacataggcttttcatctcttattagatcttccttttgccctatgctatcattaaaatgtgaaagcaattggaaatacatgaaatattttgcttttatccccatggcattgttgtaacatggactgttgcccctttttaactctgcccaatactcttccattgaggccgtacatactgtgcatttgtagattaacagtttcattgtggttcaggtactttaatgattcctactttttctagaaatctttttgtagttgacttgagttggttggctggccagtgatggtacagacttttttctcatggattttctatgatgtgtgggaggcacatcctcttggctgtagaagatgaagaggacagaaatttccttggtctaccttctttgcagctagaacatgatcagtcagatactcctactcgtgattttgtctctgatttgcctatagattgtacatgaatactatagccaccttcatatggcagtgccagcaaaagcaaggagatagtagtgacggtatcaagagcagcatcccaggttgactttctttggggcaggaccttgcttgtgtcttaacccttggttcctacccaagtttgtctctctagtcctcaactctgaaagccacttgatatcttacacaattccttttttgcctgagaaaataaaagtcagttttgatcatttacaaccaaaaatcctaactaacacagacctgtttttgaaatcaggtagattggaagtcttggtttacttcttataagcccgtccgctgtctgtcttgtaacatcccaggagcagacttaacaaggccttcctggagccttgctctttctgtctgcttccctcatctgctctctctcctctctcttcacagggtccacttcctaacacatgctgccatttctggcttatggtttggcagcagaagaccaaagcagttgtcatgctgaaccgcattgtggagaaagaatcggtgagtaatatttaatatttacaacttagtatactgtatgtgatcattagcatataaagattttcattttggggccaatattcattccttagttttggcctttaattgctaaaggctagcggtcaaagtgtttctgtccggaaaaactcatgtatccttttcctttcttaagtatttttataacaattgcagacctttcatctccaagatagaaatacaatggaataaatatggactagcagtgacatatagatctttggaatccctaggaatccttattgacctattgtcaataagtcctcttccagctttaagatcttgtactgttctacttcagatttcttactttattctacatttcataattgctggtttttaatgatgatgaaaatttcctaatccacttctaattagatgtggcaatgacatgccagaatttccagcagtatcagcatagtcatttacaggggtttttcctgatcttcaatatcatttaaaaattaaggattaggccaggcacggtgcctcaaacctgtaatcccagcactttgggaggccgaggcaggcagatcacttgaggtcaggagtttgagaccagcctggccaacatggtgaaaccccgtctctactaaaaatacaaaattagccaggtgtaatgctagctacttgggaggctgaggcaggagaaccgcttgaacctaggaggtggaggttgcagtgagccgagattgtgccactgcacctcaacctggatgatagaatgagactccatctcaaaacccactgcactgcagcctgggcggtagagtgagactccatctcaaaaaagaaaaaaaaaaaaatcaaggattatgacattgtcagtttgagcaccattgtagactacatgatttgcaaattttatttctctcattttggagtataattactgtattaataagataacactgccaccagaatttagaaatcatgtttatggtggttgaacctagatggttaacaagagtcaggtttaattattttggggaagattacttcagaggtggtgggtaatgtgttattcatcaagagacccataatgtctgattattgttctttttatttcattaatagccattattggtcagtgttcagcttcttaattcattatgggttacaaatgatgataatccaattctgtcattacttctcttaaaagcagttttccaaaaaaaagttgattccctattgaggtcatctgttctcaacagatgaccaattaggagtttttctggtggagagtggcaggagaggttgaattattatgggtttggacatactggattaattttactcctttgcagttattttccttatttttgatcaaattaccctgtcattggctagcagcaatgtctttaggttgggtcctgagtcctctttttttttttttttttttggagacagagtctcgcctgttgcccaggctggagtgcagtggcatgatttcagctcactgcagcctccacttcccgggttcaagagattctcccgtctcagcctcccgagcaactgggattacaagcacccaccaccatgcccagctagtttttgtagagatggttttaccatgttggccaggctggtctcaagttcctgacctcaagtgatacgcccacctcggcctcccaaagtgctgggattacaggcgtgagccacctcacccagctctgagtcctttttaacaaacctttaatagtttccttggctgggtgcagtggctcacacctgtaatctcagcactttggggagctgagttgggtggatcgcttgagcccaggagtttgagaccagcctgggcaacatggtgaaactctgtctctacaaaaaatacaaaaattagctgggtgtggtggcgcatgcctgtagtcccagctacctggggtactgaggcaggaggatcacttgaggccaggaagtcaaggctacagttagctatggtcgtgccactgcactccagcctggggacagagcgagaccctgtctcaaaaaaaaaaaattttttttgctgtctgtaatgactgcatctcaggctcatctcaaactcttgctgcccagacctggaaccagccatttctctaaggagttttggtttcttttaatgggcagcagtatttcaagatcacagcaaaaataaggatatatattgcaactggactggtcattgtttttagggcttttcagtggacaaaagctaaggaacaatatgcatatgttaagataacatacttcaagagttcataatgatattcccagttcaaatttggaactataagtgttgcttagccccttccatcttacatctgctatttcctttttcataccaagaatcctggttctcaaagatatgagagatgtaaactatcttgtaatgactcatttccttcttcccatatcatatacaatatataaccataatcatgatatcatctgctaccaaaataattactgaaaatggtttacaatttttaatatttttttcattctcttcctggtgtttctgagttgtactttacaaactgtagtctctcccttacatctcttgtagactcttagttctacaagcaagcattatttaatattcatcaacagtctttgctgatgtctctccagtcattctgactaaagctcattctctagtggctcctaaggagggacttgtgagcattatagtctgatttttttacatgtcagtgatggttcatctgctgtcttaatatctgaaagtcagtttggcgggatataaaatccttggctcatgtgctattctttgaacaactttttttttccatttccttctggtattccaccaaagtctaatggacatcttatttcctttataagtctcttgttctttttatctgcactacccaaagaattctttttttctttttcttcagatattattagttttaccaaaaatatgtcttagtaattggccattctgggtcagtttttacaggtacatgatgtgttcttgagagtttgacttcaagtactttttaaaattttttaaatactttttgttaaagaaatatttgttgaattacagtccttagtatttgttctgctcccttgcttgctttaatgttcttctttgggtcttcctattatacgtatgttggattttctttgcctaccttttttatttgtcacgttctctttaatcctgtttatctctttatttctattttacttaaaaaaaatttttttttttctggccaggttggagggcttacacctataatcccagcactttgggaggctgaggcaggagggtcacttgagcccaggaattcaaaaccagcctcgacaacaaagtgagaccctgcctctacaaaaaatacaaaaagtagccaggtgtggtggcacgcacctggagtcccagctggggttgggggattgcttgagcccagaagattgaggctgaagtgagccaagttcaccccagtgcactccagcctgggctactacagagcaagacactgtctcttaaaaaaaaaaaaaattatttattttcctcttaaggcattattattattattatttttttttttttttgagacggagtctcgctctgtcgcccaggctggagtgcagtgctgctatctcgactcactgcaagctccgcctcccaggttcacgccattcttctgcctcagcctcccaaatagctgaggctacaggcgtccaccaccacacccggctaatttgttgtatttttagtagagacggggtttcactgtgttagccaggatggtctcgatctcctgacctcatgatccgcctgcctcagcctcccaaagtgctgggattacaggcgtgagccaccgcgcttggccagcaacatttattttgaagataaaattattgcaagagtttgataattttagaaacataaagtgaatgtcccatgacgttaaaatataggtaatcatgctttaagaatgataaatttatttttattttatgaatatgatacctatggcttttttagtttataagttacaggaacacttaaaaaataccttataagaccggacatggtggctcacgcctgtaatcccagcactttgggaggctgaggttggtggttcacttgaggtcaggagttcaagaccagcctggccaacatggcaaaaccctgtctctactaaaaatacaaaaattagctgggtgtggtggcagacgcctgtaatcccagctgctcagaaggctgaggcaggagaattgcttgaacccaggaggcagaggttgcagtgagccaacatcacgccactgcattccagcctgggcgacagagcaagactccagctcaaaagaaaagaaaagcctatggagacagaaaatggatcagtgcttgcctgtggcttggagtgggaataggacacaaggggatttctgagtctgagagaaatgttctaaaactggcttacagtgatgactgcacacacataaaaaatgctttataaaatttcaatctctacccgccctgctccccgagatggagtcttgctctgtcacccagactggagtgcagtggaatgatcttggctcactgcaacctccacctcctgggttcaagcgattctcctgcctcactctcacaagtagctgggattacaggcgcccgccatcgcgcctagctagtttttgtatttttagtagagacagggtttcaccatattagccaggttggtctcgaactcctgatctcaggtgatcctcccgcctcagcctcccaaattgttgggattacaggcgtgagtcaccgcgcccggctataaaatttcaatcttactaaaatacattaagcgtagaatatagtagtgacttcttagttttgggtacttgaaaaaatatagcatgtatatatctggtttgttttcattttttaactttatggtttcatgatgtctataaactaaaaaaaaatcatatacatatttctaaatttaggttaaatgtgcacagtactggccaacagatgaccaagagatgctgtttaaagaaacaggattcagtgtgaagctcttgtcagaagatgtgaagtcgtattatacagtacatctactacaattagaaaatatcaatgtaagacctttcttgcccgaaattgtggactttatatgatggtttaaagaattattctttattattagatttgaagtttgataagcacatgcatttggataattcctatagtatctagccataatcacgtgtttttagattgtgtgtctgcatctagtagctttctgaggactctgaagaaacagtagaaactaagaatttcaaagttcagtttgatatttggggattaaaaattaattaatagaaatacatgaggattaatagagagggctttagaatcaggcaaacctggattcagatccagctctgctgcttagtagagctgtactttagacttgttccccaccctcactgatcccttcctcatctgtaaaatggaggttaccacgccttccctccggggctgtcctgaaggtcaaatgaggatgtgtatgcagagcacctgaccttagtaaatgcccagcaagcaatagctcccaggacctgtgactgccaagaatagcaaaatagtcaagaaaataacttacaaagctattgttaagtgattcacaacacaaaaatttgtccctattgagttggaaaaaaaatggtgttttatatatatatgtaacacgcacacatacatacatacatacacacacatgtataaatgtggcatgtggtctcaagaacatttacttgggtgtttgtttggttggttggttggttggttgattggttttttgagacagtcttgctttgccacccaggctggagtacagtggcataatcacagctctcaatgaggcctccaactcctggcctcaagaaatcctcccacttcagcctcctgagtatctgggattacaggcatgagccaccatacctaattttcttatttttttttaatagagatggggtcttgccttgttatccaggctggtctcaaactcctgagctcaagcgatcctcccaccttggcctcccaaagtgttgaggttacagtcatgagccaccatgccaggccttacttgcatttttcttccccagaaacatatgaactgttccttgggccttggttgaggtacatacacatagtgggttatgaacctgctgttgccagggtgatgattgaggcatttctccccctttcgccatttacctcttttgccctctttgtgttgtaatagaataaactagaaaataatgaaatgagagtaattctgagatgctaatagaaactgtgatagcttgaaaataggagaatgtttagcctcatatgactttaggaatgtatgtagtctataagtgaaatactgttttagttaaccattaagtaaattaagtgatcactaacaatacaaaaaaaccttaaagagaagggagatatatacatgctttttagatgtgtggcagtcccttttatggtggatcccttgaaacacttgtgttttttgctgcattgagtaagcacaggtgcatgctctgtgcgtgaggcctaggttctggttttccttctgtccagcttcccgtgacatccgtactaagcttattatacagtctcttgagtcacctaaaaaggctcaaaattacgaatgataatgcttagatttatttatacattcccattactatatttattttgtcccaactctttccatttacatgtgtcttaaactgcattgagatacatcaataactctttgatactggactgagctgtacattgttcattcccagaaacagaactgtatttccacaaggttctgaaagttctctgaatcatcttctcttggtatttatcccaggtaattactcatttgcttatggcattaaaattgatttagatgaagggcatagatgtgtttccctgtttctgaaacagtccttattgagaattgattataccttaagtaacaataaaatagaatgatttttgtgttttgtttatcagattccaaaatgctttcacatatatatcatctgaccagtagtcttcagttagtgtagatagtgtaaatattcttattatccccgtattttatattataaaaaataatagttaaaatccattaggttataggaatttttccatcgattacttagctaataagtgacagactgatctcattagttctcctggtcccctattttttaagacaaagtctcattctgttgcccaggctggagtgcagtggcatgatcttggctcattgcagcctccacctcctggattcaagtgattctcctgtcctagcctcccgagtagctgggaatacaggtgtgcaccaccacgcctggctaattttttgtatttttagtagagatggggtttcgctgtgttggccagactgatcttgaactcctgacttcaggtgatctgcccgcctcagcctcccaaagtgctgggattacaggtgtgagccaacacgcccggccatctcctaacttttgacatggggataagtccttttgaaaagatgctaattgttgtaaagagagattattgattctgaagcatctttctggagttgaggccatcatgtgagttggccagccactctgttttagttgctagcaactgtgtggtataatgacatgatcactggattttttattggcctgggtttagaacataccacaatataatagcaagaatttgtttgtgttctactttataatttttaattagaactagggattctttattctttagaaggataaagtagcatttcagtatgagaggcagaattacatttgcctaagtagataacctctagaatcagatagcccaagtttaaatcctgactctgccattcttgctgagtgacttgggtcacattactttactatagatgataaacagtacctgttttatcatctataaaatgagggtgataacgtacctacttcataggattgctctaaggatcaagtgagttaatatcatgatggtgcgggagccacaattacctttttagttgatcagtttcctttttgtaacagtaatgaattggaagggacaacaggaaccgggagtagttgaaaaggatactagcaagaaagaaagaaccaatgggagtgagaaaaagtgatgatggagtagggggctgatagccaatctcaacacgcagatctctgtctttattggagtcgctggggtgcagagatccagtttgcatctaagggagtctgacacgtatctattaacaagtccaaaggtaaagctgttgtctaagcaagccctgcgcctcctccagtctaatggaacagcaaaatgacataccaggagccctttagtgacttacttaaagctaaaagtttgaactcttgcccctgaagaagagattgcatctcggctttcagtgtggcctgtggcttaagctatggagataattttgagggattttaaaaatataaggtcatctagagtacttgtctttcagttttttctttttagttgcccttcactatttctgtaatgttggcccgctttacgtttagtgagttccaggaatactgttataatgctgactgtcttctatttccctgtccctaaagatttagcaagatgagagtctctaattattatgatgcttagctgggatttggttcaaaatagtttaaacagtttattctacctagaatgtcctctctcttctctgcacgtccttagtaacccctgtggcccacttcttacttaggtctctcctaacatgtatctatgacacattgatccctaacagctatgattcttcttatactttttcagtaatttaaattttatcattctactgcttgttcaatacatctctctatgtaaatcttgactccataatgaggtttttaacttcgaaggggttggaagttatctgctgccttggtacccccccgccattacacaagagtacattttaagcacattacacctgagtgattgttgtaaaacacagatgcaatctttccaccatcctctaagaattcttctgtggcttccattggttaccaaaaaaagtctgtgtccagtgcacaagaccatgacccagctcagcctggtccttgcctccttgtctaactccctctccttcgggtatccaggatttgttcgtgctaacagacagacttctctaataggtgaattccttggtgggggtgggtggcatgcctttgcatattgctttctctctgctgagaatgcaagcctgtccctagccgtttctgccactcctcctgatctggtgagtttgatctgcctttcacaatgaatcccagtcagtaaatatttatcactgacatgctgaccctggcaaaaattgatgagagactcaactaaggcagtgatagtgaaggtacagatttgacatctggttaggacatagggttgacaaactttgtcactctttaggtgtagaggaaatacccaatgaagaggttgaaaatgtgttgagttttacaattgactggagctttctaggggccacaataaaggcaattggtgagtatagttgttttaaaaatatccagtatctgttaagcatttaccatgtgcagggatatggcaggcacttcacattaattgttttatttattccttaacaacagttttgtaaggtaagtagtattattaaccctatttacagatgacagaactggggcttagtgaaagtcttttagaaacaaaatcttggtaccttccatatatacctaaagtgtgaaagtaattgggcctggggtcatagagctgtatagattttttatgataattggaaaatgtataatcttattatatatttatgatgattattaacttgcatttgaaggctgtgaacagggcatatgcttaaattgctgtggcctaacaattcctgttgttacacttgctcaactcacaggttattttcctggcttcatatatgcaagtttgacattgctgttcaaagactttaaatttagaattctcttttaaaaatgtaaatgggattttgccttagaacagcaagccactgacattttgtgcagaatgtagtatacataatgcagagttttacacagaaaacttggcaggcatgtgtggaacggctgcagacagggacagcctataattgtgggtgcaacccgcgtgtgtgtagggaggggggtgaagcagcgagaagggtggagggcagcagctggggaccagaggagaagtagtgtgactcggtgaccaaggagaagaaaagggtgcttccacagttttgaaaataaggagtttgccaaaaattgtaaagtctaaatgcagaccttgtttggaataaagatgaatttcgttttagctctgtatcctttggcaaccctttttttcccctctcattttttttcctgcgtgaaaaagagggaaaggggtccatccagtcatgcatatgaatgtttctataccagagtagtaaatatatgcatcttatgccttcgtgtggtcctttgtaactgtgaattatgattttggaaagctgtgtttttttaatcttgtttctgtaaggataaattaatcaaagttaacctctcaaaaaagtcctggttctgtaggggggaaaaaaaacaacaactgattttcaaaaatctattagtggggaagactatattatacaaatagtcatgagcatttctgggaactggcttccaatatcccagacagcgtgacctgaatgtgaaaaaagttgagaccactagttttgagccaaaatcatacaagcaaagagaaagcaagctgttgcccaagattgtggggtaaccatatgtttgagccaggacttgatgaagtaattgtgcgcaggaccccgtaggggtactgggccgtagcccacagagcactgcaggcccctgctcaaagcagaccacatgaaggcccacacagactgagtctggtcctgctggtggccgcagcaagtaagaaacaaagtgggttattaacatccactggaatcttaacctcatttaaaggaaaacttgactttgagttaactgtatcccccccaccccccgctgtcaagaacccacctctctagctcattcctgtgtcagtgttgccgtattaactgcccacctgctgctttgtaaaaggagactagagtttacccttcttattttagaatgttttgaattctcttttttaatgcaataaatttaatttaccttttttttttaacctacaataagattgattccttttggtgtacagtcgtgttgtgacttttgacagtgcattcagtcatgtaaccactgcccataacagaaacatagatcggttctgtcacctctcccctgccccagatgttcttgtgttgcttgtgtacagtcagtcctgtcctctacccccagccagaaaccagtaatctggtttctgtttctgtttttctgccttttccagaatgtcataaaaatggaatagtatagtatatagcctttagtctggctttgttcacttaccataattaatttaaaaataaatgtcttaaagcgtagaaaccatgatcattttaatttgtaatggagaaattttttattgcttttagtatattgagaacttgtggatcacactgtatttgaaattattaatgctggatgttaaaaggtcactaaaagtatgtactttttagaaaatttatttcactgtattttattagtattataccttatatactgagtctgggacatagaagtcttaatttctactgcaaaatggatttttttttttttttttgagatggagtttcgctctcgttgtccaggctggagtacaatggcacgatctcggctcaccacaacctccgcctcccgggttcaagcgattctcccacctcagcctcccaagtagctgggattacaggcatgcacctctatgcccagataaggtttgtatttttagtagagacggggtttctctatgttggtcaggttggtctcgaactcctgacctcaggtgatccacccgcctcagcctcccaaagtgctgggattataggtgtgagccactgcgcccggccgaaaatttatatttttaaagcgaaagctaacttctaattttgaaaatttttattgggagcaggatattataataataatctttagttgttaaaccattaaacatcaaggttttttacattgtttctatgcctcctccctcaaaaaaaaaaaacctcctacaataaaactgaaaaattgcacaaagacatattagtggaagaccactgcttcgtttacacaaatgaagagtataaagcagagaagtgctccttggggcaaaaggcaattggcaaaaagctaaggaacattttcataatgagttagaaatacagatcatcaggaatatccaggaagcgatagtgaataccaggcaggcttaagagacaggaaacatttagcatgttggtaaaccactttagcacatcagcaaaagcatataaacagctttaggattggaaattattgccatggggaaaggcaacaatttagaggagcaattccaattaaaaatataaagatcgtttctttagattaattcttgagttgctcccctatgcctgtgtagcagaatctaaaagataatcatgtgaacgggagattatatttaaaaaataaactttgaaattcataaaaaggaaaatgttaaagaatgtaaaattatactggtagaaaaaaaatttttttttttgaagatggagtttcactcttgttgcccaagctggcgtgcaatggcacgatctctgctcactgcaacctccacctcccaggttcaagcaattctcctgcctcagcctcccaagtagctgagattacaggcacgcgccaccacgcctggctaattttttgtatttttagtagaaacggggtttcaccatgttggccaggctggtctcgaactcctgacctcaagtgatctgcccacctcggcctcccaaagtgctgggattacaggcatgagccattgcacccggcagaaattttttaaaatagaaaaaaatagcccattcatgatacatgaattaaagaaaatattggtaacatgtatggtaacagattagtagctgagaacccaaaggctgccccaggttgcttcaaatcctggttctgccatgttccagctgtgtgaccttgggcaaactatcttaccctttgtttcagtttcctcatcaggaaaatgggctttaataggattattgtgtggattgagttaataagtaaagtgcttagaacaggcctccaaaatagtaagtgttgtatgcgttagctattattaatacatcacaaatttccactaaagaaaatcttccctagtttgtatatgggattgtcagaaaacaaatggaaaaatcatagtataaacagcctatatggctttaaagaattatataaaacacatgatctttctgaagtagttttttaaaagaaaaaagttagaactaacttctcccttgattttcactttttagagtggtgaaaccagaacaatatctcactttcattatactacctggccagattttggagtccctgaatcaccagcttcatttctcaatttcttgtttaaagtgagagaatctggctccttgaaccctgaccatgggcctgcggtgatccactgtagtgcaggcattgggcgctctggcaccttctctctggtagacacttgtcttgttttggtaagtgcttcttacgatctcattttaatctcattgatttttttttttaaattgcttccactggcagtgaataaactctgatgctgtatcccagaactgaggtttttcaacttaaacttctacttttggaaaaacctaaaaatctcatttccaccgttgcaactgcctcttattcatgactggtaggaatgtatccatgatgattttagagatccctaagaaggtgtttttcttcctggtagctttatattacagaaataataggtctctcccccacattttttcaaatataaattcatatgtaatattgaattccttcctcctcagacagatactttatctcattttttaaatttaaaaactagggataatgatagacatacttcacagggttcctgtgagaattcaatgaattaatacattaaggagacttagaagagtccctgatgttttctgagcattccataaatgtcagtattactgttactcccctgaggttcctgtctgtgcccccaacggctaattctttctccaccagtcattcccagtcccagcctgtatacagcctagatcttttcttctctttttaggacctttattttttcgttacttgggatacatgaaacttctgtttgcccttatacttctcctaacttctgtctttacttcttcctcttattataggatcaaacccaacaataatactgtctgctttgatttccatgccatctactccttcagtagtccctgcagcttagtttctgctttctgagcgtgttctaagattatcaataacctaagcagtttagcttgtcctggtattcagtctggtggggattttgtttttgtctttgtttagacagagtcttgccctgtcacccaggctggagtacaatggtgcaatcactgctcactgcagcctcaacctcctggactcaagtgatcctcccacctcagcctcccaagtagctgcctgcaccaccacacccaactagtttttgcttttttatttttagtagagacaaggcctcactatcttggccaggctagtctcaaattcctgggctcaagtgatcttcttgcctcagcctgccaaaatgctgggattacaggtttgagccaccacgcttgacacaagactggtgttcttaaccttgactttaaggccctgtattagtctcttcgatgtttctgtaaaacgtagctatgcttcattgcagttatgtcagcattcttatgctttccaccatgactgccagcacaaagtagattcccaggtgaattaatatgatgatgcttttcattgtaaacacacacacaaggagcttgatcaatggagtgatactcttggaaggagtgatactcttggaagaacatttcagacgttgcatctctaatgaaagctaggaattgggaacggttgagtcttaactaaacatctgtattactttaccactctgcgtatatatagtatacttcaatcaaaattagattgttacatcaaagttttaaaactctggtgattattttgttaatgacacctgttccctgccaactataacttcaacaattttttttcttttatttttggtgagcctgggtgtggggattctaacactaggtcagtagtccagagcagtgctgtagctcagcagtgttatcgtggatctgggcttttgctgtcttttccaccgtctttcttcattttattttattattctatttatttatttatttatttatttgagacgaagtttcgctctgttgccagggtggagtgcagtggtgcaatctcagctcactgcaacctccgcctcccgggttcaagagattctcctgcctcagcctcccgagtagctgggactacaagtgcgtaccaccatgcccagctaatttttgtatttttagtagagacggggttttaccatgttgtccaggaaggtctcaatctcttgacctcataatctgcccaccttggcctcccaaagtgctgggattacaggtgtgacccaccacatttttatttatttatttatttatttatttatttatttatttatttatttatttttgagatggagtctcgctctgtcgcccaggctggagtatagtggcactatctgacctcactgcaaccgccgcctcctgggttcaggcgattctccagcctcagcctccaatgtagctgggattacagacatgcgccgccacacccagctaatttttgtatttttagtagagatggcatttcgcgatgttggccaggctggtctctagctcctggcctcaagtgatttggcctcccaaagtgttgggattacaggcatgagccatcatgcctggcctcttttccaccattgttagatgggtgctgtatatccagacatcgtgtctgtagtgcagacatgaaggaggcggaaggggaatgagcagaaaggttgactcctgccatgacttttaaaaaaaaaaatagtccttatactagccagaactggttataaatccttcctttaaccaatgactggccagaaggaatgagattactatgattggtttggaatcagttgtgaatcagctaaagaatcaaagtcctccaactacttgaggggttgagatgtggggagggatgagtaggctgggatagttgttgtgtacataacagttatagctggagggttaaattatcgttgttctttcagaggagaaaatgcatagcaaaaatcttagcaatgatcttgcattgattctgtttcctgggttccaataacaagacttgtctcattttttgcctttcttgcagatggaaaaaggagatgatattaacataaaacaagtgttactgaacatgagaaaataccgaatgggtcttattcagaccccagatcaactgagattctcatacatggctataatagaaggagcaaaatgtataaagggagattctagtatacaggtaaacttcatacaggttttaaatcatatctatttgttaaatacacatagcatcaaataactgcactccacttgagcccttgtctttgtttcaaagagtgtatttgaatttttgtggtaaatccagctggctgtcttaaaattgtaaaattttagctagcttcctcatatatactcagcctcaggttaaatcctgtgtgttacttaaaagcccttgtagaaacaagatttcattaaagaaactgaatttttcattttgggggtggttaatcttttaattattaaagtaactggaaacttgagatacttttgccttcattaaacactgatacttggtttatgtgatatttgactttataacaacaagcaacttgaatatttatggcagatataatgaaattccagcaaaatgttatattcttctggttggtggctttattctcattaagctatttttactgcatatttgtagaacctaagttcaaagactgatcagaaacttgtgttatgtactaagttaaaatgtaaaatagaaacaaccacagactccattttttgtctggtttaatcacatagtattggacataagcagatactgtaagttgatgcataatataagaagatcgactgtcttttcattatgtttctcatgtgtgaacatatttactagcactttcatttctctgattactagccaatataagaatgtaaattagatcggaccattggtgtcagaataaaggtttatttaaaaagattttttccaaatctttaaatagcattaaaatattcttaatgcacagaaacattagggcactcagagccaaaatacgcaatgtttgggaaactcagcccattagaacatgtcctgcttcagacgccagactttgggaacactggatttgccagggtcactttggcagtgatcagtgatttaggtgaagtaaaagttatttcagatgtttaagattaggaaaatttccctttctaatcacagtgagctttcaccaacttaaatctggagttcaaaaagaaaagtagttcaatcagatttccccatgccttcacagcctgcatgccgccttccctgcctgcttcctggctgtgatgagacgggtaactgggagggaaatgtattgtcctttggattgtgtctttcctaccactgctttttttttttttaagttttgtgtctttagttttagaatacatactttatctgagggtggatctttttttatcacagagatgagtttttctggacacacttttttgtggagtctttgacagtgcagtttgtggctaggaaggattttttttctgttaatttatctggtgtgatattgtcctcaggctctcaattctaaggcattttctgcccctattccagataggatattggaaacatctttatccttcaggtactcaggatcagaaaagcatgctgcccattccaaggggttaatttctgcagaaatggtcttggcattctgagaatcttttttaattggtgcatttagaccatcggcatatgaagtgattactgataaagttggattaataaatacataccacacatgctactggtttttttttctttttttgagacgcagttttgctcttgttgcccagactggagtgcaatggcacaatctcggttcactgcagcctctgcctcccaggttcaagtggttctccccactcagccttccgagtagttgggattacaggtgcctgccaccactcctggctaattttgcatttttagtagagatggggtttcacagtgttgaccaggctggtctcgaactcctgacctcaagtgatcgcccacctcggcgtcccaaagtgctgagattacaggcgtgagccaccgcacccagcccaaagtgattgtatcttaagtctgtaaatatgtgtaattataatcttaaagcatgtattcatttacagaaaacttccaatgactttgacattcctatagacatataggctatttgcaattgcctttcagcacaaggtcaggcataaatacttaagctggttgctggtattaccacatatttattagcatattcccagtattgatgatgacagttaaccccccagagtaaatatctagtttggcaattcagaactaatgttgtaagatctctagctggtaatttgatattactaataaagtattaaatgtaaatgataaacttttaacaaattacagaggatttgaagtttaattgcattgcttaaagctttcttcagtgagagaaatgggtagagctagggttctaggcattgtgtggggggcatggctcctagtggcagtgactcatgggttggtgcaacgtgagcacagaattagaaagaaagatgaaacagtaccaggcctcaaaatgagagctcctttgaggttatagtttagtgaaatgtaattccttggcttcaccagtcagcattaatgacctgaggcaggtgactcaggagtgctggctcccttgtgtgtcacagggaggacagagacgagtgagtttgctgaacctatataggcatgagtgagtttgctgaacataggcacgagtgagtctgctgatcatagccatgaatgagtctgtcgaacatagccatgagtgagtttgctgaacatagccatggcaaaatgacattgttgggtttgtggggtttttttaattcactagcattaaatatctcttttatttctctctctgccgagtgctttccttgttgacgtattctgaatttgttgcatattctgggaagtggtccagtgagacttgatttttggtgtcatcttatttgttgacattgttgagtgttgtccagctataaggccaagttacataactaggtctcagtcaagagtggaaacttcaaaaattgaccagtgtaaattctggagacaatttaacatttttgtggggtactttgttgaacacacatctttataaggggtcacagcatagtcaacccagacttgcctaggttaaaattctgtctctactatttgttaggtgcatatccttgggcgagttacctaattattctccccacatcttccgtaaaaagggtgtaataatggtaatattagtattagtgcttatctcctaaggttattgtgaggattaagagctagcacatttgaagtgttagaatatggcatggagagtagcaagtactccatgtcttcactataaaagatttggattgagtaacaaaacaaacaagggaacaaagaaaatagacagtcatctaagtgaagacatccttaattactcctgtgttccattatattgtagtttcttgattgttggcacagtattctttcggggacatggtttgcgccctcttagggctcaggattttcagttctaccccactactcatgaagtccagagacctctttcccggaggtctatttcctttccagcctcatctctcctactcaagctttgcgtgttttccatcctctagacaaattgtaccaaactgtactactaactgttctccaaacacaacaaactgtagaatttcacattttctaaatcttctgtaaatcaactattataaaacaaaaaagccagccgtggtagttctctcctatagtcccagctactcaggaatctgagacaggaggactgcttgagcccaggagtttgaggctacagtgagctgtgatcacaccattgcattctggcctgggcaacagagtaagaccccatctctaaaaaaattaaaaacataaaaagaggtacattgattatgcagctaagtaaaatagccatatctgggaacggtgaagtgtggaaaatgcttttttttttgaaacagagtttcactgttgttgcccaggctggattgcagtggcgtgatctcggctcactgcaacctccgcctcccagattcatgcaattctcctgcctcagcctcccaagtagctgggattacaggcttgcaccaccatgcctggctaattttgtatttttagtagagacagggtttctccatgacaccgagtctcatctttcacccaggctagagtacagtggcacaatctcagctcactacaacctcggcctcccgggttcaagcaattcttctacctcagcctcccaagtaactgggattacaggcatgtgccaccacacccagctaatttttgtatttttggtagagatggggtttcaccatgttgcccaggctggtctcaaactcctgacctcaagtgatctgcccacctcagcctcccaaagtgctgagattacaggcatgagccactgtgccaggcgtgcctttttctttttaatacctctggtacatgatgacaatgagacaaattagaaactagtttatccattgtatgaatggatttcccagagattttttaaagatctgaatacaagcattgcttttaacagtaccatattgcacaagagtaactccagggaatgaatattccataagttctaaaaaactttaagttgcaatgttacatctctgtccaaaatcattagactcctcgggcaataagtagagtattccttatttattagatccaagactccttgcgtccttgataggatcttcaaagaaggccatccctgtccataccaagtcatttgggccagtgtcagtcataggtaatcaaaaccattggctcccactgcttctgcctctaccacttgccactggcagatacatagatggggatcatgtttcatcctttcaaggacttgagagactatagtcccagtgcataggttatatatgcgtttttcttctctggcatgtacaattgtcactgctttcatctgcaggggcccagatacactcttcttcctctacctttgtccctaggaatggtgacaagtgagagcacaggaaacatattttctagacatgatgctgggcgcttcacatgccatctcattaatcacaactgtctcccagggtagatgatgacatcctctttcatagaagaaactgaaatttgtcttcatcttggtccgaatcctggtttgtgttgccatctactcctgaaggccatgctagaggcatgctggagggtgtttctctagcccagtggtgggctagccagctgcctggagctgctagcgtacctgatagacacaaccaaattaaagtcctttagcatcacaaggaccagcttggagatctcaccgttagttctcccctagactgaacagtggcaaggagcaagaaggttccagatcacattcaagcaccactgtggtgactactccagtgttacatacctctggattagaagtggattaagattcaagcaaaatctaccttggctgaaatctttttaaaaatttttgtgttttttgtgcagtgctactttattttttattttgtttttttgtctgttggttggttggttcttttgagacggagtctcgctctgtcgcccaggagtgcagtggtgtgatctcagctcactgcaacctccgcctcctggggtcaagtgattctcctacctcagcctcccgagtagctgggactataggcgtgtgccaccacacccagctaattattttgtatttttagtagagatggggtttcaccatgttagctaggatggtctcgatctcctgacctcttgatccacctgcctcagcctcccaaagtgttgggattacaggcgtgagccaccgcatgccccggcctttgtttttaattgacacttagtaattgtacatatttatggggttcagtgtgatattttgatacatttatgtaatgaccaaattagactagcacgtctatcacctcatacatttatcttttctttgtggtgaaaacgttcaaaatcctctcttccagctattttgaaatctctatttaattatatattattatgtgctaatatatttcatagtacttgaaatatatataagtatatataagtatttcgaaatagccagaagagaggattttatgtgtatataaaatgtgtatgtatataaatttttttcgagatagggtctcattctcttgttcatgctggtgtacagtggcacgatcatggctcgctcactgtagcctccgcctcctgggctcaagtgatcctcctgccctagtctcttaagtaattgggactgcaggcgcgtgccaccacatatggctaatttttaaatttttgtagagactgggtctcaccatgttgcccaggctgatctcaaactcctgggctcaagcgatctgcccgccctagcctcccaaactgctagaattgcaggcatgagccaccacaccctgtctgaaatattaaatattattaaccatagtcattctgtgcagtaaaacaccagaactcatccccctgttgaactgttgttcagtttctcactatgccccctcttccctactctgcgaagcctccagtaggtactattctactctctgcttctatgagattaacatttttagattccacatatgagtgagaacatacagtatttgtctttgtgtacttggcttaatgtcctccagtttcatccattttgccacaaaagacaggatttcttttttttttaatggccaaatagtattatattatatatatatatatatatttttttttttttttttttccacattttctttctccctccattcattgatggacatttaggttgattccgtatcttgactactgtgaatagtgctgcaataagcacaggagtgccgatatgcctttgaaatcctaatttcatttcctttggataaatacccagtagtgggattgctggatcatatgatagttctatttttaatcttttaaggaacctttatgctgttttccaagatggctgtactaatttacattccaccagccgtgtacaagagttcccctttctccacattcatgccagcatttattttttgtctttttgataatagtcattctaattggggtgtggtgatatctcagtgtggtattgatttgcattattctgatgattagtgatattgaccattttctcatgtatctgttggctctttgtatgtcttttaagaaatggctattcaggtcttttacctatttttaattggattacttgtgttttctgctattgaattttgtttgagtttcttatatattctggatattaatccctgtcaaatgtatagtttgcagatattttcttccattctgtagattgtctcttcagtctatcgattgcttcctttgctatacagaagctttttagtttgatgtaatcccatttgtctgtttttgcttttgaggtcttatacaaaagacccttcccttgcccagaccaatgtcctgaagtgtttccctatcttttcttctagtatgtatatttgtttggggtctcatatttaagtctttagtccattttgagttgattttttaatatggtgagagataggggtctagtttcattcttgggcatctagatatccagtgttcccaacaccatttatcaaagagactgtccttcaccagtgtatattcttggcatctttgtcaaaaataaattggctgtaaatacgtagatttatttccatgctctgtcttctgttttattggtctttatacctgttcttatgatagtagcatgctattttggttactatagctttgtagtatattttgaggtcaggtagtgtgatgcccccagctttttgctcaaaattgctttggcttttggggtcttttatgatttcatacaaattttaggattatttattctgtttctgtgaagaatatcattggtattttcattgaattgcattgaatctgtagatcactttatgtagtatggacattttaacagtattaattttaatccatgaacataggctatctttccatttgtgtcctcttcaactttttccattaatgttttataattttcattatagagatctttcacctccttggttaaatttattcctaggtaatttttttgaaaatggaattgctttcttgatttcttttttcagatagtttgttagtgatgtataaaattctactgatttttatttgttgattttgtatcctgcaactttactgattttttttattagttataacagttttttggtagagtctatagggttttctatacataagattatgtcttctgcaaacagagacaatttgacttcctcctttccaatttgaataccctttctcttagctaattgctctggctaggacttacagtattatgctgaataaaagtgttgaaagtgggcatcctagcccggtgcggtggctcatgcctgtaatcccagcactttggggggctgagatgggcagatcatgaggtcaagagattgagaccaccctggccaacatggtgaaactctgcctctactaaaaatacaaaaattagctgggtatgctggcacgcgcctgtagtcccagctactcgggaggctgaggcaggagaatcgcttgaacctgggaggcagaggttgcagatcatgccactgcactccagcctggtgacagagcaagactccatctcaaaaaaaaaaaaaaaaaagaaaggaggcatctttgtcttgttccagatcttaagaggaaaagctttcaactttttcatgttcagtatgatattaactatgggtttgtcataacgtggctttgtgttgaggcacaatttcctccatacttaatttgttgagagtttttatcatgaaggtatgttgaatttttttttttttttgagacagagtcttgctctgttgcccaggctggagtgcagtggtgcaatctcggctcactgctacctccgccttctgggttcaagcgattctcatgcctcagccacctgagtggctgggattacaggcatgcaccaccacacccagctattttttgtatttatagtagagatggggtttcaccatgttggccagaccagtcccaaacgcctgacctcaagtgattcacccacctcagcctcccaaagtgctgggattacaggcatgaaccaccacgcccagccgctatgttgaattttatcaaatggtttttctgcatctgttgaaatgatcatatggttcttgtccttgattctgttgatttttgagagatcatgtttattgatttacatatgttgaaccatcctttcatcccttggatgaatcccacttggtcatggtaaatgatgtttttaatatactgttgaattcaatttgctattatttcattcaggatttttgcatccatattcatcaaggatattggcctgtagttttcttttttgttgtgtccttgtctggttttggtatcagggtaatgctggccttacagaatgattttggaagatttccctcttcagttttttgaatagtgtgaaaggaattagtattatttaaatgtttgttagaattcagccatgaagccatcaagtccgggcttttctttgatgggagactttttattactgatttaatctcactctttattggtcagttcaggttttctatgtcttcatggttccgttttgatagttcgtgtgtgtctaagaatttagccatttcctctaggcttttcaatttgttggcatacagttgtttataatagtctcttacaatactttgtttatggtattagttgtaatatctcctttttcatctctgatttgagtcttttttttttcttagtctgctataggtttgttgattttgtttgccttttcaaaaaaatgatccttggttttgttgatctttcgtttcttttttttggtcactttatttccattcttctggtctttattattttctttgttctgctaattttgggtttagtttattattttctagttccttgaggtacatcaggttgtttatttgagaactttctttttcttttttttttttttttttttgagacagtttcactctgacccctagactggagtgcagtggcatgattttggctcagtgcaacctccgcctcccgggttcaagtgattcttatgcctcagcttcccaaatacttggaattacaggtgcccaccaccactcctggctaatttatggtagagatggcatttcaccatgttggccaggctggtctcaaactcctcacctcaggtgatcctccagcctctacctcccaaagttcttgggtgtgagccacccacctggcctgattgtgatttttttctttttttaatttgttgagacttgtttttgtggcctaacatatggtccatcatggagaatgttccatgtgctgatgagaaaaatgtgtattctgtggctgttggagggaatgttctgtaaatgtgtgttaggtccatttggcctagagtgcagtttaaatccaatgtttttttgttgattttatgtctggatgatctgtccattgctgaaagtgggatgtagcgttctcctgctattattgtattgcagtctatgtctccctttagatgtaataatacttgctttatatatttgtgtgcaccagtgttgtgtgcatagatatttaaaatcattacatcctcctgctgaactgacccctttgacctttgtttctttttacaatttttgacctaaagtctattttatcaaaatatagctactcctcttctctttttggttttaatttgcatggagtatcatttctcatcccttcactttcagtcttagtgtgtccttacaggtgaagtgagtgtcttgtaggcaacatagagttggattttgttttttgttttttcatccattcagccactgtatcttttcattgaagtatttaatctatttacattcaagggtattattgatagataaggacttacacctgccattttgttaattgttttctgtttgcttttcatattctttattcctttctttctctcttattgtttacctttgtggtttggtgattttctatagtgataagctttgatttatttctctttctcatttgtgtgtctgctgtagttactttttttctttgtggttactctggggcttacattaaacatcttagagtgttttaagctgataataacttaaccttggtctcataaaatatttttggcttttaccctccccccacaacttataattttgttgcttaatttacatctttttatattgtgtggtccttaacaacttgtagctgtagttaccattaaccattttttacttttaaccttcataatggagatttgaaagattatattccacagttacagcaatggagttttctgaatttggtaattaatttacctctgtcagtgagattatattttcatatattttcatgatagtaattatacttttgcttccagtcaaagcagctcccttaagcatttcttgtaaggctagtctagtggtaataaattcttgcagcttttgcttgtctgggaaagactccatttttctttcatttctgaaagatagctttgctagtagttgttatctttcagcactttgaatatattatcccattctctacagtctgttctttcttggcgtgtacaggttttctgagaaatctgttaatagcaacctgccaggttcccttacatgtgacttgatccttttctcttgctgcttttagaattctctatgtctgacttttgatggctttattataatgtaccttggagagaggacctctttgcattgaatgtgttcagtgtgctgtcgagtttcatggatctggctaccaatattaaaattatattactgtgactaatagttgagtgtggtcccagtatagtttgtctcaaataggtaaaagtccacaagattttattaagattattatattcaactatatactcatgtacataaatactaaatgctttattataaaattttgaaattaaaataagcatagttgttacaagctacagtatggcaaaatgcctttttctttttcactcatcttttagcatcattgggttttcttaacttgaatataggattttaattcataaatttttttatttaaggaaaataaatttttaatgtttgcatttgtttttcatttctcttccctacctagaaacgatggaaagaactttctaaggaagacttatctcctgcctttgatcattcaccaaacaaaataatgactgaaaaatacaatgggaacagaataggtctagaagaagaaaaactgacaggtgaccgatgtacaggactttcctctaaaatgcaagatacaatggaggagaacagtgagaggtaagctttctataactacaggctgaaagatgaggcttttttattttaaaaataaattttatgggaccaggtgccataggatttcaggtatgtaatttttatattaggaaaatacaatcacgcctgtaatctcaacactttgggaggccaaggagggaagatcacttgagtctaggagtttgaaaccagcctgggcaacatagtgagaccttatctctacagaaaataaacaaaattagccaggtgtggtgatgcgagcctgtggtcccagccactcgggagactgaagtgggaggatcacttgagctggggaggtcgaggttgcagtgagctgacataccaccactgcactcccacctgggtgacaaagcaagaccctgtctcataaataataataataaataaataattatgtggatatgatatatgaaataatataggcccttttttttattgaattaatataacctttttttttctctgtcacccaggctagagtgcggtggcacaaccttagctgctccacctcctgggttcaagcaattctcctgcctcagccctcccatgtagctgggattacaggcgcccaccaccatgtccagctaatttttgtatttttagtagagagagggtttcaccatgttaacaaggctggtcttgaactcctgacctcaggtcatccacccgcctcagcctcccaaagtgctgggattacaggcgtgagccaccgtgcccagccaaattaatataacctttatttcttacctgagggtatttagtatatgatgacaaaggtgttcttaaggagctttcagccaatacttagaaaccagttcaaaaatcctttaaaacaataatgattgagtgtaaaagttaatataattgggtgctaaaatatatggtatggtacagaaaataagtagtatgaatacctgccatttgtactataattataatgtaactgataatatgcctttaataaaacatttaaacatgtaagcttaattgcattactggagaaagaaaaaggcgttttttaaaaatccatatgaatgtggcatctattcagaattttaaattacaattacatttctaagactgtctctcacagattaggaagctgataacctggtataagtcacatagcaaagtgaatgaggtttttctttcctctctcctgcatctctgaataacttttcttcttctctttttgccaaatatacttcttatcatggggaattttatcttgtggttatatttgttagattggaatgaaaatagtcgaagtctgccatacattatagctttactgctgtattttcctaatataaaaattaaatacctgaaattttataaatgctaacatattccaatatataatacatgtattattatatattatagtggaagagtttattatgatttagtaatgttattcccaatttttgacttcagtagttttagactgcaagagaaagcataatttttttggttccttttttcatcttaaatagaatatctttaaatcaggaaataatagttttaagttaccttagctttttcaataataaggctttcagattcctagtgttactgctttttccccccttttatctagtactatctgcagaattaaatgaaaaacaggcttgatgactgaaatggcattcttagtatttcagaagtgttgagttttaatctacaaagattcagaacaaccatgttaatcctagtgagttaaatcactcatacaagcttgcaaatacagaggagactactaaaaccactctagagtctataactctaaggagttatagagtgattgcagaagactgttttatggggtctgtgtgtgtgtttatgtgcctgtacatgttttcgcatgtggtggcggtgttttcttctttcccttttttccttccctgtctgataaatgagactggtgcatgtttgaaagcagagagtcccaacagaaaagtcagaattctaagcggagaagtctgattacaaaaacaaggttacagaaatgaaaaagaggaggccgggcgtggtggctcacgcttgtaatctcagtgctgtgggaggtcaaggcaggtggatcacttgaggtcaggagtttgagaccagcctggccaacatggtgaaaccccgtctctgctgaaaatacaaaaattaaccaggcactgagagtgagaaacaacttggacatacgaattttaaaatacaaaaattaaagaggcattaacgcctgttgtcccagcttcttgggaggctgaggtgggagaattgcttgaacccaggaggttgcagtgagccgagatcataacactgcactccagactgggcaacagagcaagactcttatctcaaaaaaaaaaaaatgtaaaagaagagcataggatcagggtgtgaagtaaaggttactctgaacagttttattttttaatcagtcccagtaatttttaatacctatagatagctttgcattaaagatcctcataaaagtcttatcaaaagaatttcaagtttcttttttttctttttttttttcctgagacggagtcttgctctgtcacccaggctgaagtgcagtggcgcagtcttggctcactgcaacctccacctcccgggttcaagcaattctcctgccttagcctcccaagtagctgggattacaggcccccgccactacacccagctaatttttgtatttttagtagaggcagggtttcaccatgttggccaggctggtctcgaactcctgaccttgtgatcctcccgcctcagcctcccaaagtgctgggattacagacatgagccaccacacctggccagaatttcaactttcaaaagaaatagaacacagtactttcttgtattcattttcattgtattcatttggaggatattcatcctccaaagcagtgtttttcaaattgaaggtcaaatcacatagtcgtgaagtttattggattataaacattttttaaagaagaaaatagaataaaatagaaattatcagcatatcacaaataataacatgaatttaacagatgctggcgaggttgtggagaaaaaggaatgcttaaacactgttggtgggagtataaattagttcaactattgtggaagacagtgtggtgattcctcaaagacctaaaaacagaaataccattcaacccagcaatcccattactgggtatacacccaaaagaatataaatcattgtactgtaaagatgtaaacacacgcgtatgttgattgcagcactattcaccatagaaaagacatggaatcaatctaaatgcctatcaatgatagactgcataaagaaaatgtacatatacagcatggaatactatgcatccataataaagaatgagatcatgtcctttgtaggggcttggatggagctggaggccattatccttagcaaaactaatggaggaacagaaaaccaaataccccatgttcttactaacaattgagagctaaatgatgagaacacatggacacatagaggggaacaacactgggggcctgtcggaggatggagggtgggaggagggggacaatcaggaaaaataactaatgggtactaggcttaatacctgggtgatgaaataatctgtacaacaaaacttgttgtacatgtcacggagatgacacaagtttcaagcttatgtaacaagcctgcacatggacgtacccctgaacttgaattttaacctgtttttatatatgtatgtgtgatgtataaattccatatatttacatatacattgtgtacctatgtaagtgtgtgtgtgaggttactctgttgtgatgctatttcttactgtaggttgcagtctgaatttgaaaggcagtattctcaattacagttcaacccagaaacccagatcactgagagtgagaaacaacttggacatacgaaaagtctggagcaggcagagtggctcatgcctgtaatcccaacactcggggaggctgaggcgggtggatcacttgagcctagcagttcaagaccagcctgcgcaacatggcaaaccctgtctctacaaaaaatacaaaaatccgccaaatgtggtgggacctgcctgtagtcttaagggaggctgaggtgggaggattgcttgagcccaagaggttgaggctacagggagctatgatcacgccacatgatcttccctgggcaagggtccacaggaggcattcccattggttaatatcctaaattgcataaatatacgggaaaacctgggcaggtcccatttggcaagtcattacacagacataatttctttaggccccactaaggaagaaaagattttatcacaaatcgagagtagtcttgtcattctctggaattgtgttcttaaattagatacaggcatgccttggtatttgtctctagtccattcctgaattatatagtgcacttttggaaagcaaaaacctctgttccattcttttaaatgagaaaaatagtgtgttgtcagcccaaccagaaagcataaccagttcccccaaatatagtacaaaaccttttaaactcctatgtagcatttaaagcactaattatgtaatcatataacacttaagggactcattattgggcttgtatggtaaatgacaaaatactagatacaaattataattgccttctataccgcaatgaaaataaaaaatgaaataatacgttaaagattatatctaaattggaaccttgttaacgatacccccaggctcctggcaaaagctaataaagggcccatgggaggctaaccccctctctgtttttatacatattttgcctacacttgaacacaaatgttttcactaacaggtacatgcatatttgtgatagtgaattttcaattcagagagtgaattctgagtaagaatttttgcaagtcattatagcagatattcagatggagttcagacagccagggatacctgtatatatgataacaaaaagtgaaaaagacatgagaaagcaccataagatgaacaaagatagcaaaacccagtctgtcctcaagttgcagaatatgtgatgaagataaaacaagtacccaagttagcacattattagtaaattataaattacttcaaattaaatgccgtaagaatagaagggctagagggggtggagcaagataattgaagagtagaactgaaatgagaggacaggagagaagggaaggtttctattttagtggggaacaaatttggagaacagcaaaaaaacggcaagaacaaagttctgcatagcaggagaatattggcaagcgtttgcatggacatgtgttctcagttctcttgggtacatatctaggagtggaattgctaggtcatatggtaactctatgtttaactttttgaggagctgtcaaactgttttctgtggcagctgaaccattttacattcccactaacaatctcttggggagagaaggttccagtacaccaaagaagtgtaacattgattaaaatattctaatacatagttcaattcagatttctcttgtctgaaagattcaccatatagcttttttaataaagttttatggaaatataatttatatagcataaagtttactcatttaaagtatacaattcagtgacttttaatatatttaccaaattgtgtagctggcaccacgatctaattttagaacattttcctgatcccaacttctgtagctgtttaaaaaatatttcaagattaatcaaagattgatactatatttagttgatgtgattctttggtctcctttaatctggaactgttccctgcctttttcttccttgcttgacatttgtatttttgaagcttctaggccagatatcttttagaatgccccatacaatgcatttctttaatcattatttatcatagttaaattcaggttaaacgtcttggccaggaaaaaggtagtctcaatgtaggagacattgaagaggcatttgagatttttaagcaccatcgtgcactaggcccggtaacgaaaaaaaaaaaaaaagattttaaatcaagctacgtgtccaggggtatgctctagaaaaattaccatggcaataatatttaatttgagggcagggaagctggttaggcctttgctgtaatacagaaaagtgaaaagagggaatggaagaaatagtaacctatatgttgccattggccgtttttttgtttttgtgggtgtgcttttatagagaggcaagacttgctatattgcacaagctggacttgaattcctgggcttaagccgtcctcctgagtagctggatggcattattatttatatagaaccagaactaagtatcttgagagtcagagaccttccactgaaacaaaatttctgagaccggacacagtggctcatgcctgtaatcccagcactttgggaggctgaggtgggcggatcacttgagatcaggagttcaagaccagcctggctaacatggtgaaacatcatctcactaaaaatacaaaaaaattagccaggcgtggtggtgcacgtctgtaatcccagctacttgggaggctgaggcagaagaattgcttgaacccggaaggcgggggttgcagtgagccaagatcgtgccactgcactcccgcctgggcaacagaacaagactccatccaccccgcctcccccaccaccccaaaaaaatttctgtattgactatgaaaatgggaggtagaaatgtgtatggtcaaataaaagaataagtgctcccacaacagaatattcatggaaatattaaatagctagcttttataagagccttaaccatcaaacgtgaccaggaaatgggatcagatgcaagtggtacccccttgtcttcccactcctgctcctgctgactagttaacaaggaaggaaagaaaactaacagtcatcaattcacgtgtcaagaaagtaccttgcttattttcaggtcccactaaaagcagttatcaatataaaactgtaccaggaatggttgtcaaggtacatctctgaatcattaaagaatattgaggcttttcttggccgggcgccgtggctcacacctgtaatctcaggactttgggaggccaaggcgggtgaattgcttgaggtcaggagttcaagaccagcctggccaacatggcaaaaccctgtctctactaaaaatacaaaaaattagctgggcatagtggtgcacgcctgcagtctcagttacttgggaggctgaggcacgagaatcacttgagcgtgggaggcagaggttgcagtgaaccaagattgtaccactgcactccaggctgggtgacagagcaagacgctgtctcaaaagaatattgaggcttttcccctcattattccagtgttcaaatagggtgaaaactatgtggatggttttatttgcgcctaggtcctctgtgttagagtactcaagtcctgctctgtgtgcacttcctttcacttgtttttatttcctcatagtgctctacggaaacgtattcgagaggacagaaaggccaccacagctcagaaggtgcagcagatgaaacagaggctaaatgagaatgaacgaaaaagaaaaaggtggttatattggcaacctattctcactaagatggggtttatgtcagtcattttggttggcgcttttgttggctggacactgttttttcagcaaaatgccctataaacaattaattttgcccagcaagcttctgcactagtaactgacagtgctacattaatcataggggtttgtctgcagcaaacgcctcatatcccaaaaacggtgcagtagaatagacatcaaccagataagtgatatttacagtcacaagcccaacatctcaggactcttgactgcaggttcctctgaaccccaaactgtaaatggctgtctaaaataaagacattcatgtttgttaaaaactggtaaattttgcaactgtattcatacatgtcaaacacagtatttcacctgaccaacattgagatatcctttatcacaggatttgtttttggaggctatctggattttaacctgcacttgatataagcaataaatattgtggttttatctacgttattggaaagaaaatgacatttaaataatgtgtgtaatgtataatgtactattgacatgggcatcaacacttttattcttaagcatttcagggtaaatatattttataagtatctatttaatcttttgtagttaactgtactttttaagagctcaatttgaaaaatctgttactaaaaaaataaattgtatgtcgattgaattgtactggatacattttccatttttctaaagagaagtttgatatgagcagttagaagttggaataagcaatttctactatatattgcatttcttttatgttttacagttttccccattttaaaaagaaaagcaaacaaagaaacaaaagtttttcctaaaaatatctttgaaggaaaattctccttactgggatagtcaggtaaacagttggtcaagactttgtaaagaaattggtttctgtaaatcccattattgatatgtttatttttcatgaaaatttcaatgtagttggggtagattatgatttaggaagcaaaagtaagaagcagcattttatgattcataatttcagtttactagactgaagttttgaagtaaacacttttcagtttctttctacttcaataaatagtatgattatatgcaaaccttacattgtcattttaacttaatgaatattttttaaagcaaactgtttaatgaatttaactgctcatttgaatgctagctttcctcagatttcaacattccattcagtgtttaatttgtcttacttaaacttgaaattgttgttacaaatttaattgctaggaggcatggatagcatacattattatggatagcataccttatttcagtggttttcaaactatgctcattggatgtccaggtgggtcaagaggttactttcaaccacagcatctctgccttgtctctttatatgccacataagatttctgcataaggcttaagtattttaaagggggcagttatcatttaaaaacagtttggtcgggcgcggtggctcatgcctgtaatcccagcactttgggaggctgaagtgggcagatcacctgaggtcaggagttcaagaccagcctggccaacgtggtgaaacaccatctctactaaaaatgcaaaaattagctgggcatggtggagggcacctgtaatctcagctactcaggaggctgaggtaggagaattgcttgaacccaggagatggaggttgcagtgagctgagatcacgtcactgcactccagccagggcgacagagcgagactccatctcaaaagaaacaaacaaaaaaaacagtttgggccgggtgtggtggctcacgcttgtaatcccagcacttcggaaggccaaggcgggcggatcacgaggtcaagagatggagactgtcctggccaacatggtgaaatcccttctttactaaaaatacaaaaattatctgggcgtggtggtgcatgcctgtagtcccagctccttgggaggctaaggcaggagaatcacttgaacccgggaggcagaggttgcagtgagccgagattgcaccactgcactccagcctggcaacagagcaagacttcgtctcaaaaaaaaaaaaaaaaaaagtttgaaaaccattggtatagatagatattttgaattgatttgcatagtctccttgaatgtgttaaattatgttgaaagtatgaaagcaggatgtaggtggtactacatattaaataagatttatataacatgtgcctgtgtcctgattcagtattactgtgtcctgtaaccttgaaatggagaggaggtaagagggacatttttttatgtctgtctgcattaaacctgtgttgaggcatccaagacccttacatttcaggttgttattggtttaaaacctctttccagtttgcattggtttgtctttgctaaatgcagtatgtttatgttactctgcaagtcacatacaggtagaccttatgacatttccagttgaaactaggcttgctttcggtacacaggtgaagacttgaggaagccagtgccagagaggacgtgcctcacccctcagctggctgaatgcgcttcattggcttacgctttgctttctgtatgctttctgtccttctgggtggtgtcgcatatatttttaaaaccacattcagtgtgatgaacacttgttggtacacttctaaggttagtcatctttccttctctgagcagatccttgagaagggcattgacagtggatgctttaaatagtgttcagtttttaccagtaataatattttttggtggatgtcatgaaaacacatgacatcgtgttgtgcccatgataaaaagtcctgactttttattgaatgaggtgtgctggtcaaagagacagacgtggctgccttctctggtaacagccagaggaaaaagttagcaattctagatgggttctacagctttaaaaaacttgttgtatccttaggtcctcataatattaaatattttctaattttaacagattttaagagtcagatatatactttgacttgaatgatgtagtgttgcttaaggaagaaaaaattataaaaaaaatgtttcttttattttcaggagtttttaattcatatctagttcatttccactcatatctatttctgctaatagattgacagcaacctttggtttaatgctgtgttctctagctacaccaacaagttatatattcctttccaatattaaccaagtatttattttatgttagcctatgactgagttttatctatgcttgcacatatatagaatgtaaaaatataattctccatgtttaatgtatccatataaaaatgaaaatacccattttctgcattcttaaagggttaagaaaagtaacatgtaataagcacatggaggactttagaccatttcttgtgttagaggagactttatacatttgtgaggttttctgtcttttggtccttttatgttcttagtccatttcattattgttttaatatttctaccaaggaatgaccaagaaaagagaaaggaagaaaaaaaatgtgttaatcattttcttttaatggtatgtcagcagaaggggttctgactgtaagctaatgtgcacttgtgcctgtcctctttgtcttaaactaaagttggtggtatgaatcgaaaaatgtgtattggtttaaaaagcagtttatgatatgaaacagtcttccagtttttatatcaactcctttgctttcaacagtcagttcaaagcaccatttattgatggtttactgtatgccagacactgtattttttctttacgtattaccctacttaatcctcaacacaattttatgaagtagttattgttagcctgaaactggcatttctccatccttttatggtgctgtctttgaaaagtctcagatgtgtaacatgtcctagaagtagataattatcaaaggaagactgcaactgcaactcacttccctctgagaaaaaatatccctgactagattacatatctagttccagaccagaacctggtggtattaaaagtgttttggttgactattgtataccataatgagtacctacattcccaaattgcctgcctggttgttgtacagacttaaaaatctagcctgccttgatttttacttttcagatacacatgtttaaagagatctttgctggtcacagtagctcacacctgtattcccagaactttgggaggccaaggtgggaggattgcttgagcccaggagtttgttcaagatcagcctgggtctctacttaaaaaaaaaagaaaaatttagctgggtatgttggcacgtgcctgtagtcccagctactcaagaggctgaggcaggaggatcacataagcacagaagtttgaggctgcagtgaactatgatggagccattgcactccagcctgggcagtagaggagacttgtctctctctgtatatttgtctctctctccctctctctctctgtctctcataatacatatatacatacatatatatatacacacacacacacacacatacagagagatatataaaatagatataaaaataaagatattttaaagattatttataaatatatgttttttaaaaatgtagtctattataagccaaatgtcattaggcatgtagtccatttctttctgtgttcaggcaggagttccagttctataaacattggtttatctgtttttctagcaggtgcacacatgggttctcagtgatgtgtagccggggcatagattgctctcagtctgttgcaccctgcaggggagatgtctgaggtcctccctcgcctggctgtgctggacgcacagtgcatagcagaactaactgcacagcagaaatgcctgttctgcgttcccattgatacaccaacagctaatgaagtctcttttacttttaagaaacccttatttggctttggcatatttacatggtagaggcctagaattttataaataaaattttgaagaatagaaatgtattttttcacgatttaaaaaccacctgtatggtttactctggagttgacctgttccactcatccttctccccagttcatttgtttcgtttcaattccactttcccttatagctatcttcaaagcagtgtctatgggacagcattgccaagagccctgactgggcctggcttggtaactcactcctgtaatcccacctgcccctagaagtgcagatatactagaaaatacagctgtctttgttccagtgaatatgtataaggggtgacatgccttggtggaaagcagctcagattgtgtggactcctcaatccctgctctaccaagagctctccagttccaaaactgtacactcagtggctatgttctgtgtgcctgctcccaatacagccattatgttgttcatccagatttgagaatttaagcttttcactcctctttgggtagtattatttaagtaagaacttctaggaaaatagtatgagtttggttatttttccctcggcagcaggaattttctgaatatttagcacattcagattgctccaagaacagcattgagcaatgctgtacatgtgctttctcctaaggctgtctcccctgtctactgggttctggaaagactcattgtccttcagggaagggagcatttttcctcactgccattgctgagccttttctcctgttgtatactatttagcccagcatgaagccatcgccgactgtaaggagtgatggatagaagtgtttacttggtttgtgaggccttgtctctaaagggtaacagtctgacaaggaaaacatttcaaagagccctgaccaggcctggcttggtaactcactcctgtaatcccagtactttgggaggccgaggctggagaatcatttgagcccaggggttcgagaccagcctgggcaacacggtgaaaccccactctatttaaaaaaaaaaaaaaaaaaaagccctgatccccctctctgggcgatccattgggagaatttgaaaagttcaaacttttgaactcttcctactttatttttttaaatttagaatggaaggtgggaattatgcaatttggtgaagatgttacagaaactgcttcacgactttctggttttacgttatacagtatgttttgaggagctccaagaattgcacaggaatttttttctttatacagaccattttttaaagacgcatcaagttattctttattgtggctctaatttggcatatttttcagacacaggttgctcttgatacatcaaatttctgctgttaaaaacttcagttattttgagtttagttaattcaggagcgggaacctaggtaagtcatctgtagagcatctttgcaccttaagagaagtttctgattagcctcaattcagtttagtagaatattagtgtggatatctggtggcaaaacctattcttggtgcaatttggcttttcgtggcctcaggcatagagctgacttggtagtggaccctctgtccacacccacccggcccttgcgcctttctagcataaagtggtgtgtcagagccactgtctccacagaaagcaccacgtttgtttcatttgacttatttgaacccgtttctcctgcctttgcctttttaaataaaaatagcaaaaattgattcaagtgaatctattagaattttctaaaatggagcccatttgtcttttcagtcttgcaagtaaagtctttaaaacaattaagcctcccaatgatttaaccgtattttcttacccccccaccctgaataatatttacaaagaaataataacgtgaatttttaaaaaccccgtccttcagttgttataaatgatagttcattcttggtaagtatatctgtaacaaaatactggggaaggacatgaggtatggtgaacacttaaaattctgccagccagcttaaatacataatctaaatttaacccacgtaacacctcttctaggtaaacagcattctccctatattcagatgagaaaactgagtcaaagaataagtaacttgcccaagattgcacagctagtacatgacagaactgagattcactctgcagtctgtagacttccagtaactccaaacctcatactttttcttttatgttacacggactctgtttttaatggaatatttaaatgagatatttaagtgggaaagtaatagacaaccactcttacctgttaaaatccaaagtaattctctagtttttaaatggagcacatttaaaaaactttgtgcaccagtttgaactaccactgcaacagagaaatactagaacatcagagtattctctaaaccagatcattacttcattcactttgattgaattgagttgcttattttaaaaagacttctggatgcatggaaaacatatatattttgcagcactcagaatcaatacaaagtaccttcagccactttggttcacattctgaagattcatgtaataaacacccatagtagttgtgggctcacattatctaatgagaatgttttcttgatgacttgacatttctccgtcactgttggataatcagagaaaaaaaggacgttcagaacaccaaggtgcttggtacaattatgccaagtgccctgtctttaaagggagtagcctaattctcagcatttgggagtttttgactaaatgtgtggatatgatttgtatttcctatttcttaatatatatgtgaagatacaatactgacaagtacttagatttggaggttttgcggtactgaggggagttgggggaagaatggaaataccattgacctcctaaaaagttgttacttgcaaagtttgggaggtgacatcaaaaactcaactgcccttacaatagtcattccatccatctgttgcttatttgaattctcatttatttttactttatggcattaaaatacaataaatctgtcaattatgtattttatattagtagtagcttaagattgggtcacttcatttcggtagatataattgttagtattatccttcaggacaaaaagcatctgctaacaacctgtggtttaaaaatataggccaactttatgttcaaacattatgttgataatatttttagcagtattacacagtggaggtccaaattggattagacttttgcattgaattccaaagtattggtaagtctagcacatagtataaagtcttgctaaattcttgtgggtacattatttttaaaacctgtctgtctgtcggtatcacacagaggtcacttcttgagtaaaataagatgaccttaagaattcacataattcttgaagaagaatataagtcacgatgcttccacatgaggccgcgtcacaccaccatcgtttggaaatccagcaccccagccgttttaccctaagataacagtgcagcacttagtgtggttgaatgtgtcatgtgggaatgatttttggtcaccttttcagttcattgttagtccttttatgtttgtgtgcatctatgttcgtctgtgtgtttggtaaatatgaattgaatagatgacttcttattttatgttttaggccaagattgacagacacctaatattcatgacttgagaatattctgcagctataaattttgaaccattgatgtgcaaagcaagacctgaagcccactccggaaactaaagtgaggctcgctaaccctctagattgcctcacagttgtttgtttacaaagtaaactttacatccaggggatgaagagcacccaccagcagaagactttgcagaacctttaattggatgtgttaagtgtttttaatgagtgtatgaaatgtagaaagatgtacaagaaataaattaggggagattactttgtattgtactgccattcctactgtatttttatactttttggcagcattaaatatttttgttaaatagtc

SEQ ID NO: 4 - DNA, 59258 bp, Mus musculus
acctgggcagtctctggaccacgcccccgcctgccccgcctcctccacgacgtccgacccacgcggcgcccaggcagcgcgctgacgtccgacgttccaggtactttccccaaggccggcttggctcaacgtgggggggcggggcggggcgcggagcgcgcatgcgccacagtgccagcgctctccccggatagagcggggcccgagcctgtccgctgtggtagttccgctcgcgctgccccgccgccatgtcggcaaccatcgagcgggagttcgaggaactggatgctcagtgtcgctggcagccgttatacttggtgagtcttaggcccgcgcggcgtcccggggcttccgagggtcggagctcgcgcctgccggctccgtgtcacctcccccgtctcccgctcgggcggaagtggcgagcgcgggccgcgtcaggggcgcgcctgcgcggacagtcctcaccgctgtgaggcttagacctgaagcaccgaggtgccggtcgcctgttggttctgaaggcggcgccacagcggcgcctgctggcggcccggccggcctcggcgtgtggtgcgccgggcggagggtcgaggggcacccggcgcggggtgggacgggctccggcttcctcgctgaccgtgttcttgtcggccgaatgttcggtggccgagcgcgctggtagcgggagcagcgagaagggcgagagagccctctaggatcggggccagcgaaggcaaagcggggtcccacggagtctcggtcatttgcgggtgtcccgggggcctgtggccggagctctataccagagccggagctgaagcggcggcctaagctcctgagggatcggggatcgccagtcttttcattggccactttctctgggagagcgggtcatcttctgcttagagctccccggaacaacaggggctttggttgtattaccattgattaaagtagcgtcctctttagaatttcctttgcttaggcatactttatagatgtatatatagtacaccacaggaatttatatgagccttgcagttggttgcatttcccaaatgagtgcactggtcgtcgtagcactcaaaagtaacccaacaatctttcggtccaaaagaggccacatgtctataggccgccgctgtgctctgtcaccagagaataaccttacctattcagctcattctaaagtattctttcctatgaacgcttgtgactacctttttacagcgtgtgggctaccttttaatccaggcaaaacttttctccccttaaaaatgattcattgctaatcattaacgtctatcccagatcagatttagtgattggtgtctccttatgttttggcttgttactacagtacagaaagaagctagaaagctttcttttagctctggatgactctgggttttcaccatttcatttaattagatggcagtaaaaattcgctttgtttaggacttatttctcccatcctcctttgagataaggtctcacagtctataacttttgctggctcagaacttgctttgtagacctgcctgaccttgaactcctaggctggctttgaagtcctagtcttctaactaccagtgtcaaagttctggaaagaagttgtagaaaatcttaaatgcaaattctagtggatttgtgtgtgtgaacttgcaggtctgtgggtacattagatttagcagagtgccgcctcaaaaatgccaatgacaaaaggggtactaaatcaaggaagattgctgggtggtacatgcctataaccccaaagtttaagaggcagagggaggtctgtgaagtgattttattttatttatgtagccttggctgaccttgaactcagattgtcctgcctccccagtgctgggactaaagccgtgcacctccatgtccagcacagctctgagtttaggctagcctggtctgcatagttccagaccagccagggctacatagtaagatcaagtatgcatgatcttatatacatacatacatacatacatacatacatacatacatagaggtgggagggggactagagagatggctttcatttaagagaacttgttcttccaggttgattcctagcacccacaagcagctcacaactgtttctagctcctgttattgggaatccgaagcactcctctggccttcagggatgccagttatgcacatggtgcctaggcagacaaaatgccatacactcagaatcaagggggaaaagtaaaataataataataattactattgttactactactattattttaaaaacaagggttcatactagcaacttaatttagcctaatttattttctgagaccaggtcttgcttagtatcacaaactggcctataatttaccactaggtttggatttgtgacagtccttttgccttagtcccccaattgctaggattatagggaagagccaccacatgtggcttaattgggtacatacatgtaagtcattaatgtctgagaagtaagtgaaagttgtgatcccacttaacagggaaaaaaagcacttatgctggatggtggctcagcctgtaacctgtcaattaggctgaagcaggaggattgttgtgagtttaagactagcctgcagctgggctttggtggccaagcctttaatcccagcagagtcaggttgatcttcagtgttcagccagcctaggctgcatggtgagttctatgctacccaggactaaggaatacattcttgtgttggaataaaaaatttctaaacaaaagccagtcatagtggcatggtttttttgggaggggggcatgtttcgagacagggtttttctgtgtagccctggctgtcctagaactcactctgtagaccaggctggccttgaactcagaaattaaaggtgtgtgccactacagcctggggtggcatgttttttaatcctagcaccgaggaagtggctccagaaagtatctggagttttaaaggtcatctccagctatccgtggagttatgggtcagcctgggataatcgagactcggtttaaaagtaaaaatcttgctggcaaggttgctctgtgggttaacagttgcccagcctgaaaacttgagttcagtcctgtgattcacaaggagggagagaaccacctttctttcacagatcttcgtatatacctgcctttttgtgtgcagccacaatagcgaagttaaaatgtaattgtaaacaattggatgttcagggagatggcttatttgtttagtgtttgctgtgaaagcatgaagacctgtatttagatcttccccatttccataaaaagccaggtgtagctctaatcttttgtgctggggaggtgaagacctgcaaatctctggagctcactggtcagcgggcctccctgaagcagtgagctccaggtttaatgagagacccagtttcaaaagataagggtttgggggctgcagagatggctcaggggttaggagcccttgctactcttgcagaggacactagttcagttcccagtgtccacatcaggtatctcagaactgcctgtaagttcagtgccagaggatctgacatcttctgtcctctatggggagtgcaatcctgtgcacaaacacatgtttacacataactaagagtaaagataaaaactttttttaaaaaaaggtatagaactgtcaatggcaagaagattcagagcatatgtgtcacctcccaagcctgacagtttgtttgatccttggtacccacatgatggaagaagataactgattcctacaagttgtttcctgatctccacatgcatgcatagcctttataagtaaatgtcagaaaaaataaatacaggcaaatacacttaacttgtgttcactgaaaatttctttttcagaaaccctccatagacaagtgcacaagatctttaagcaaaatagtagttctgtgctggcactttttttttcaagcccaagagcattaaaaccatgctatgtacattggtgttacagtaaaagcaagccaggagccactgaagctaataatgacaagcaagtccggaagagtttggacttaatgctttcttagtatcctggagcatccatctcacattccacagagatggctgctaccaacatctgtgctgtcaaggctctaattctgtgagtcttgaggacctctttggaaggtcatactttgctttctttctttttttttttgagacagggtttctctgtatagccctggctgtcctggaactcactttgaagaccaggctggcctagaactcagaaatccacctgcctctgcctcccgagtactgggattaaaggcatgcgccaccacacccggctaattgagttacttttaagatattagaataactggccaggcggagaagtagctcaagcgaagcagttatttctctccttcagctctgtactcactgttttcccagtgcccacatgtaaaattcagctcttctgcctcaataccactggggctgcctctgtgtggctttatttcctatgtcatttttctccccctcctgcactattgtggtctgttcttggaaatgtgtgtatccacttatccccgtgagcctctagaatgaaatttcctttgcacaactgctctcctgttgcttctttcccctgttgcttaacacctttgctcatgtctgacgctggactaatttgggaagcttcctaacctaccagtccatgctggatatgtgcaaatctttgacagtagggttgaagaaatgcagaggttctgtgtgtgttcccagcacccacatggcagctcacaaatgtttgtaactcctgtttaagtgagcattcttccttattacaagtaagtgacgctagtaataatgttttatgagttctgctttttctgaaatgctaaaggagctaggagaagaaaggattgctctcaagggtaaatcaagatcctcagcttttagctgcttgatggacatgagaatgtttacttcgtattttatttcagtttttgtacttacgaataaattgagtatttttggttgaggttctggcctcctcgtcttttttattccctatagacagttgctttagagcatcacttttggaaataggtgtcgtagctcatactgatactagcacttgagatacttcagggtggaggatcttagaggtcagtctgagcagcgtatctaatttcaagttaattcatgtaatttagcatcatcctatttttaaataaaagaaaacaaacctaaaaagccatgatttagtaataggaagagtttcttggttggttggttggttggtaggtttttttttttttgagacaaaaaactcactctagccttgtctgacttagaattcacaatgtaacccggttgggctccaactagcaatccatcttcttctgcttcttcagtgctaggataaagtcaagcaccaccatgccctacttttgtttttttgttgttttttgttttttgtttttttgagatagagtttcaatctatatagctctgttactttggaactcactgtttagccttgaaccaatgctgatcctcctgcatcagtttctgagtactgggattagagacatgggtcatcacgcctggtgaatgttgctggatttgtgtttttgttttctgggggataccagtcatcaagtctgtggtttcacaatgccagtcagatgctctaccactgagccagagccacagttacctctcttctctccccacacaatttctgagctaggtctctgtaatttgctagccttgaacatgatatctttctcctttagcctacaagttgttgggtacaggcctgggccaccaggatgggcaaggcgaaagttctcgatttatagaaagaaagaaaaacaaaatgctgcagttgctaaaatctatattaaggccaaatcttcagtctgaggaattggaaggataaagaaatttgctggttttgctgctgtggtgtgtgtaagtgtgctaatatggaaaaggacttaaattgcagagctgagtattattatctggtgttctacattcactgggagctaggaatgaactcccacagataagtctcttggactattttacatatttatacacatctgtagattttttttcttttttttttcttagatattttcttcatttagatttcaaatgctatccccaaaacctcctatccccccccccccccccccccccgttccccaacacacccaactcccgcttcctggccctggcattcccctgtactggggcatatgatcttcaaaataccaagggcctctcctctaattgatggccgactaggctgtcctttgctatgcatgcaactagagacacagctacacagctctgggggtggggggtggggtactagttagttcatatcgttgttccttcaatagggttgcagacccctttagctccttgggtactttctctagctccttcattaggggcccatcccaatagatgactgtgagcatccacttctgtatttgccaggcattggcatagactcacaagagagctatgtcagggtcctgtcagcaaaatcttcctggcatatgcaatagtgtctgggtttggtggttatatatgggatggattcctgggtggggcagtctctggatgatctttccttccatcttagctcagaactttgtctctgtaactctttcttttcttttttttttttttttaaacctttaacttatttcttttttttttttaaattaggtattttcctcgattacatttccaatgctatcccaaaagtcccccatacccccccccatcccctacccatccactccccctttttggccctggtgtttccctgtactggggcatataaagtttgcaagtccaaagggcctctctttccagcgatggctgactaggccatcttttgatacatatgtagctagagacaagagctctggggtactggttagttcatattgttgttccacatatagggttgcagttccctttagctccttgggtactttcttgggggccgtgtgatctgtaactctttccatgggtattttgtcccccattgtagagttatttttaaaattatctttgtgatgtatagtgtgatgacatactattaatttttacttttgctgatgtatagagtcctaaattcttgtaatgaatatgtattaatttattaaaggtgcaaatttctttttctctccaataaaatcacagataaaaacccaaagtaaggctaggtatagtgtggtgcatgcctctaatcccagcccttaggaggcagaggctattagatttctcagtttcataggaggcagagcaacataaatgagaccctatctcaaaaaacaagagtaagattctttggccacttggtagcctggttctcctgagattactggtacaccctcatattggaacagggtctcaagtagcccaaactgacttctaactacttaactgagactggctttgaatatataatcctgttgcctctactccaaagtgttgcaaccacaaacttattaccaccatgctcagaatattttgtattttaaaggtaagcattggttattaaaacaaaacactagtaagctaggtatggtgtgtatgcatgtaatcccagaatttagaagactgagattaggtttgccatgaatttgaggccagcaagggctacaaagtaagaccctatttaaaaacaaacaaacaaacaaaaaaaaaacaaaatccaaacaaagtaaaaccctgcaggagatcttagaatttatttttctacattgtatcaacacagtaaggttttttgttatgtgtgtagtaagtacagcctgttcatgccatacgtgtatagagggtcacctaaaacttctgggagtagttttctcctcctcagcaagctcctgcgatcaaactgaggtcatcaatttgtgtggtgctagcccttttatctgctgagccatctcaacagcctgagacttaagatttttttatacatacatacttttaaaattaaaaggttgtttcaatatgtaacccaacagaaagattttaactaaaaacatttgcttatctcaattccaataactgcactgaaataaattccttcctccctcaaatttgtatttagaccaggtatcacttacttcaagttaattataaaagctatctccagaatatatgtacaggtacacacacacaccacttacttcaaagtaattttgaattatccccaaaacatacatgtacacaccattaacatctgtctgtctatctatccattcatccatccatccatccccccacccatccatccacacacgtaaaaatagtgcttggtcttgtattcagatctcacctaccaccaccatctagttttttttttttttttttgagataagctcttttttgtttgtttgtttgttttttgtttttcgagacagggtttatttgtatagccctggctatcctggaactcactttgtagaccaggctagcctcgaactcagaaatccacctgcctctgtctccctagtgctgggattaaaggtgtgtcccagcacgcctggcttgtggctgtttctttaatgatcgtcttataacaaattgttttaaggattttataaatatctacttaggaggatcttctcaattctgtgatctgtgtaaaagaattattttatggtctggtttgttgcagttaaaaaaaccctgaaaatatggtagtgactgtaatgtagacttcagtgatttcttcagcataagtgtgccatcgggtaccattcttcacctagtaatgtagaagcatagttatggcttctttctgctgcagacggggaaacttttagcaccagaatgcacatcagttgtttttgcaacatggccttggtggtagctcagctgttggccttccttgtctctttttgagaaacactttgtatttcattaactatactaaaagatcggatacatgcagggaagtggggtatctgggggcctgccaggctgtgccgttaaaaattacgccatgtaacaggtttattgggagagtagggagactgaaatgcctccctagactgggacattagagagagatagacagacagacagacacacacacacacacacacacacacacaaagatagataatgaaggagagagaggagtaattgaagagagaaacaagagagtgatctggggtggggtggagttaggagggggttacacactgtgtgcacctgccacacctgtccccctgttggctggggtggaaggtgacataagccacctttatattcctgagggctaacactaaatgctcataaaagttacatcttgggtattgctcccccccccccccaaaaaaaaaaagaaaagaaaagaaagctgtacagtgtcagatggtagtttgtgatgagttttggttatacactgtcttagggtttttgttactgtgatgaaacaccatgaccaaaaccaagttagggaggaaagagtttatttgccttacacttcctgtttgaaggaagtcaaaccggtcaggaaactggaggcaggagctgatgtagaggccatggaggggtgctacttattggcttgctccttaaggctgctcaggaccaccaatccaggggcaacaccacccaccatgagctggaccctctcctattgatcactcattaagaaaatgtttacagttgaatcttatggaacacttggggttccttcctatcagctaactgtagcttgtgtcaagttgtcataaaactagccagcacattctcattatttagacatctgatttagctgcataggaaggaaaataaagcagtaattgacaataggtttgtggtttttgtttggtgagagttctgaagctagggctgctgttgtgactccctagtgccactgatggtagcctttaatttctgtgtagctttttttttttttttttttttttaagcctagtgatcacaggaggttcctgcctactcccatcccttactcctggtggtcaaaacagaagagagggcaagagtttgctgaggcagtttttctttattattgaggtttcatttttgaggcaggatctcgtcttaagtgttgcccttggccaagcatggtggcacacgcctttaatcccagtactcgggaggcagaggcaggaggatttctgagttcgaggccagcctggtctacaaagtgagttccaggacagccagggctatacagaggaaccctgtctcaaaaaacaaaaaaacaaaacaaaacaaaacaaaaaaaaaaaagtgttgctcttgatcactattcttgggttcaggtggtcttcccacctcagccgaggagctgctactgcccagcagcttatccagtgtgtgcaggccactcagctggcacagatagcaggataaacctttctctacaaccaagcccagtgctgctgcttattccattggccaccttttgtcacaagccttttaaaatttgagacagggtcttattccctatgtaggtgaggctgctttcatagagatccacctggctgtgcctccctagtgctgggattgaagactgtgcaccacccatgcctggctcatagacatcaagctcttgtaaactagaaaatcaaattagaaaccttcagttaggaagaagggaaagtgggattggctgttggtgtgtgtgtctctggaactggtctttataaagcattgggatttcttatcttacactggccagagttaaaaacagaaaacaagtggaagattgaaggtctgaaagaataaattcactaagggtttttttgtattcttagctaacaaaagaaagtaagtatggctctatttttttagggctgaatatttggattggggtgtatatatggcattgttttgtaactcttaagtccttattgctgtactagctcctgccatcttttatttatctaataatgcatcttaattaattctttgagaacttgtatcttgatcatattaatatgcccctcccctgctttttccctgaaactcttgccaggtccatccacttcttatctccccatcacattatgccttttttatttaacctttttatggatttattacttttaattttatgtgtgttttgccttcatgtatatttgtgtcatgtgagtttagtgcctacagcggtaagaagagggggtcagatcccctggaactgaaattatacatgttagccaccatgtgggtgctgggaattgaatctgtgtactctgaaagaacaatcagtgttcttgactgctgagccatctctctggcccctatgtttagtattttaagagatgcctggagagatggcttagctcttaagagcactggctgcggagctggagagatggctcagtggttaagagcaccaactgctcttccgaaggtcctgagttcaaatcccagcaaccacatggtggctcacaaccatctatagtgtggtctgatgccctcttctgggatgcagatgcacatgcaaatagagcacttgtatacataaaataaataaatcttggggggaaatccttaagaagagaccgtctagctgggtggtggtggtgcaggtggtgcattaattcaatgagaggcagagacaggtgagtctctgagttcgaagttagcctggtctgcagattgttgcagtatcctgtcttctgactcaatctttgttctttcttcgtagatttttccctaaacccctaggtatgtaggaagtatgttgtggatttagtggctggctaacccctggttagctccctgcattttgacaagttgtgaatggtttctgtgttacatgaagtttctttaataagcagcctgtcctacacttatctatggatataagatgaatagtaggagtgggattgagagctatactttgttggtttttgtttgttttgtttctctgtataacagaggcctagctgtcttgtagaccatactggccttgaattcaaagaaatacacctgcctctgactcccaagcactggggttaaaggtgtgtgccaccaggcctagcccttttttcccaccaacatcagtaattattatagtgtatacatagaattttgtctagactgaaaaataagaactagcaactaatagacaatcactgaggaagataggattatacaacagaacagttgaagattcttgtacaggtttcatggagggaacctctgctgaccagtaaatttcctttccttgtctgtctgtccgcctgttcgttcgtctgttcatccatccagctatccatccatccatctattgagtctggcctagaactctacctctagctcttgagtgttgagattaaagacatgtgccaccacacccagccaccagtagttttttaaaaatctcatttataattgcattagagttaataagattactcagatgaaactgttagcatattatttttgaagaaaaataaattaaaatatgagctgtaacacaaaagaggtgaataaatagaaacaaagcaacttttatttccatatatttagactttactatttagcattagtaactaaaatttaattatcttgatgataaatgaaattttgaaatagaattacactttgaaagaacaagtgtaactggtgaatgtaaaaattaataaatggcatggatcatttctgttagcattgtgaggtttgatatgatataaacatttctttgtagagtacttaaagtaagtgcttaatgttgtcctatattgcctgggagaatatatgttgctgtataaaatttaagagggatattaaatatatatttttgttattttaaggaaattcgaaatgaatcccatgactatcctcatagagtggccaagtttccagaaaacagaaaccgaaacagatacagagatgtaagcccatgtaagtactgtaagatacagagatgtaagcccatgtaagtactgtgagatacagagatgtaagcccatgtaagtactgtgggtttatgtgcatgtgtgtgttcttcagcttgtttcaggagacccgatgcagtgacagtctttgggtaaagattgattagtatagcaatttttaaacttttatatacttttgttttgagacaggctttcactctgtagtcccactgttctggaaattaccatgtagcacaggctgacctcaaatttgcagcagtcgtcttgtctcagcctccagaatattgggattattaagtgtcagccaccacacgaggtttaatgtatacattttctcatgtgtttgtacacacgcatgtggaaggttgaggttgatggtcagatgtcttcctgaattgctctttaccctagagatctgttccagctagtctggctggccatcttgttctgttagaacttgtcctgggattacagtcaggctgccacacccacctggccttccatgcgggttctagggatccagtctccaccccttacatttacttagtcatctccccatccctctggtttgaggaacatctgattagctcttctaagctctggtagaattcagcacttaattgtctgttgcactcaggtggaggatgttcctataacagctcagcatttcctatcctcatccagggttctgcagtctgccagtgaactgaccctcacaaaggctctccttccctgttgtacagcttttttctccaggtgtcagagccacttactgtgtgtcgtgtcatccccctcttcagcacattcatcctggtgtcctgatatctgagtaaacactatgaaacaccagccttagagtacctaggccttttcagcactctttgatcttgtgcccacaaagaaagcagggagggattttttaaaattttgtggcagggctccctgcatctgctatactgtcttccaactgtgacttcctgatcagtctcctaagtgctggaattacaggcctgtgcaccacacccagctttcaccctgcaccttgaaggtcactttctgtgtgtcactactgcttttgttgtttatttttttgttttgctttgttttatttttgtttgtttttgaatatttcacttagaatgtatatggtttttcctggcattgggttctttaatactttgagttttagattactcaagtgttgctatatccttcagtttgtttgttcgttgagacagggtttttctatatagccctggttgtcctggaactcactctgtagaccaggctggcctcacactcagaaatccaccttcctctgcctccaagtgctgggattaaaagcgtgcaccaccactgcccagctgctatatccttccttaaccagtctgtttctcatatctatttagctgttttattttaaaatatctttgaccttaattctccaatttatgaagccccattttggaagactttattctttattcccttagagagtttaaaaactcaagaacttagagtcaagaaacaacacttaagctgtaatgtgacaccggggaagtgcctcagcttatgcacatccctgaagtcccagggcttctgtttctctattcctttgtacatacatcccttccttctttcctcctcctggtctgccttgctatcttcagcctctttgtccctgcttttccttcttattacataaataggatgtagaatgcttttccctttccctcccacccccaagttatttcctaggtagatctatgcatctacacaacaggggtttttgtttttgtttttgtttttgttttttgagacaggatttctttgtgtagccttgactatcctggaactcactctgtagactagactggcctcaagctcacagatatccacctgcctctgcctccaagtgctgggattaaaggcatataccaccatcgctgctatcatcactgccctgctgaacataacagtttaaaaagaatatattctgggactggagaaatggcttagaggttaggagcactggctactcttttagaggacacgggtttaattcctagcacccaaatgcatctgtaactatagttctagggaatctgatgtcctctcctagctagcctctgtaggcactgggcacacaagtgtaggtacataggtatacatgtaggcaaaacacccatatacataaaatttaaaaaaaaaaacaaacccaaaacaaacaaaaaggccaggtggtggtggcatacacacaatcttgactgggggtgggggggggtgggaagaaagaaacaaaaagatcagttagttctcctttctgtctgtcctgatcacctgtgctctcttcatgaacccccatgcagctaccacaccctcctcactggaacttagttaccttgctagctttcagatgcaatcaatgactttcccttggtttcccttcttatccttctgtgtcttgtgagattgccgactctgtcttccttctcaaggacttatttactttttctgtctgctctcccatttttagagccgtccatcctcaatttatctttatttttttcaagggtcttttcctctcctcactattttttcttaatctatgagtgatctcattttcttgggggccaattgccatgcttattttcatgacttcacatttgatctgcagtcttggtcttaactccaaacagatgtttgcaagttgtcatgtgccaacctgacatgaagttagtcaaagaaccatagaaccatagaaagcttatagaaccaatggttgggtattccctacattgctttattccttctatttgtaactggtaccaccatttacatattgactaatactggaaacagactccttattcatctgccacatctaattagtaactaaatagtttactgtgagtgtgatctatttaaaatgttttcttatgtacatactagcttttttgtgatttattatagtaacttctaaacttttgggactatatagatggctcaggagttaagggccaaatactgcttttgtagaggacttgggttcgtttcttagtatccatctggtggctcacaaaacacctgtaacttcaacacatccaacaggcatgcagccccccttctctctctctctctctctctctctctctctctttctctctctctctctctctctcacacacacacacacacacacacacacactaaaataacctctatagctccattctattactgctttcttcctttctcttactatccaagttgttttcccgccccattaaggcagaaatttaagtttgtcatcattatcattctagactttttatatacctttatgaccctttatacacatctagattttacttatagctattttcctacaaattattcatttgagtaagagtggattacttagcattctcccattatgactagtttctaacatactgtgttctcaaatatggtgctcactcatttctttcttctctttaatgacagtgacggtcttctccctgcagtgccaaatcagccgcgccttccgccggctggtcttttcaccatggagaggatattatggaagcagggttttgtgtgtgagcatgcattttaatgttttttgagacagggtcttctgtctattatgtagctctggctgtcctggaacttactctttatacctggctggcctctaactcacagagatctgcctgtatctgctgtcaggagatagagacagtggagtcactgtgagtgtgaggccaacctgatctacatagtgagttccaaacctgctaagaccatatacaaagaccctgcttcataaaaacaaataaataaaagctgcacagatttatgattctattagtatggcttacctataatcatagtccattgtagctacagaacaagaatattctcagtaaatatgtgtataaatgagttgatacatggagagaaaataacaaaaagttagagacttatcttcctcctccagtgaaatgacattgtgctcttttggagagagggtctcagtatgtagccttggctggcctgaagttttacatacatcaggctggctttgaattcatagacatcaaccttcccggcctcccctttgctaggattaaaggtatatattaccacatctggggacaagtctgtgctcataggcttttaaaatttatttatttttgtattttatgtatatgaaggtttcttctgcatgtaattctgtaccacatgtgtatgtggtaactgaggaggctaggagaatgtggatccctgggacttgttatccaagtaacagatggctgtgagctgccatgtgggttctggaaattaaaactagtcttccggaagatcaggaaataattcttttttgttttgttttgttttgttttgttttgttttgtttttttcaagacagggtttctctatgtagtcttggctgccatggaactcactttgtagaccaggctggcctcaaaactcagaaatccacctgcctctgcctccaagtgctgggattaaaggtgtgcgccaccaccgcccatcagcagataattcttaactgcataagcatgatgtctccagcaatggacctttttttttcttttcctccaattttttattagatattttcttcatttatatttcaaatgctatctggaaagtatcccataccccctcccccactcccctacccacccactcccacttcttggcgctggaattcccctgtactgaggcacataaagtttgcaggaccaaggggcctctcttcccaatgatggccgactaggccatcttctgatacatatgcagctagagacacgagctctggggtactggttagttcataatgttgttccacctacagggttgcagaccccttcagctccttgggtactttctctaactcctccattgggggctctgtgttccatccaatagttgactgtgagcatccacttctgtatttgccaggcattggcatagcctcacacgagacagctatgtcagggtcctgtcaacaaaggactttttttgtgataaatttcatactgtaccctaagctgacctcagttgtggcaactcttcctgcctcagcttcccaaatgctggggttacagttgtaagccaccacagctagccttatttttggctttttgagaaaagggtctccccaagttggccttgatcctcctccttctgcctccaaagtgctaagaccctgtgtgctcatggtggacacagtattataaagaagttgatttatctcttgcctatcactgaatctcatgaggagcagaagtgtgaatttattcaagataaggcttcttacttaaccctcctatgaaggtattgctgctggaagtgtactaaacattaattctgcattgccagaggtgctgaagattgcccttatcctagcaaaatggattgacacagtagtagcatgcctatccttatgtgtgactcatccacctgtgatgtgtgtcaggtttgctgagcacagaatgagcctcattaggggtgatgattagaagctagggaagtgagtaagcctctgcaggaccaaccaaaagggaaaaacttggctaagtgctaacttgtactcgtgtcatgattaaggatgataccaaagaattctcagattagcgatgtcattgatgaacacttcaaatgcaagaaatgaaaaatagaagcttttgggggagagatggctcagtgtgtaagagtgtgtgctcttgcagaggacctgggctcaattcccagcatttacaggttgctcataaactgtctcttaactctagttccaggggatctgatgccctcttctgatatccattggtaccagacacacacatggcatacataacatacatgcagtcaaaatagtcatacacctaaaaataagatccatatgtttataaaaagttttttattttccttatcaaaatgaaactttaaaaatactgatgaaattttagtttagtgttttaagttctcaagtcattgtttgttttgttttgttttaaagacagggtttctctgtatagtcctggctgtcttagaactatctctgtagactaggctggcctcgaactcagaaatccgcctgcctctgcctcccgagtgctgggattaaaggtgtgtgccaccacgcccagcttggattctagttttatagacagtgaactgttcccactacgttctttactgtgtttattcatgcagagtgcagattccttgcaggtactttctagagaacatttctaagtacatggaaagcttcaacagagacctggaaacagctggtttatgcttttttgttttgggggattgaagcaaagactaggtgcatgttagacaaatgctaaccatgctcttacacctctatccctctgtactatttctcttttgagacagcgtactgctcagttgcataggctggctcttgagccagcatgtaggcctaggcaagaaacaggtcttaacctttagataatcttgcctcaacctcctaagtgactgggaagtacaggtctacctcattgtatctcaccgttatttgcctccatttgtttcaaaaacccctctcccgtgccccctttatctcttgattctttatcaagtgcagccttcctcctcacccttcccagactgaagtttccattccccagtaaggagctgtttgggttctgttttgtttgtttgggtgccaggtgtcaaatactgggctgatgacttctaagttggtttcatttcctagctgttgtgaatagttcatagtagtatacatggatgtgcaactgtctgtggcatgttggcatagatttctttgcccacgcttttggaaagttgtgggaatcttttcttgttcttttggtatttgttaactatttcattaaaaatttatacattagcttccattttttttcattcatagctagggtattccaattttcttttgctatttatggatagtagaataaaaaagggagtaattgccgggcgcagtggcgcacacctttaataccatcactcgggaggcagaggcaggcggatttctgagtttgtggccagcctggtctacaaagtgagttccaggacagccagggctccacagagaaaccctgtctcgaaaaaccaaaaaaaaaaaaaaaggggggggggagtaattgaaaacactattacactgccatgatattatgcctttaatcccagtactcaggaggaagaggcaggtagatcttttgagttcagggctctgtgagttcaaagctagcctggtctacagcaggttccaggacagccagagatagacacaaagagaccttgtctcaaaaaccaaccaagcaaaaaaacccttactatacttacacttctcactcactgaataattcaatctgacagcccttggggtgggggtgatggtcttaaaagtcatgtaaaggtgataatgtcctaaaaggaaagaccttgtgtggcaattgagctaagagtgagccctgtattgttagattaggattgctgtgttcttgtatgttaggacctggttttcagtgagtactgatatgtagaaaaggctgggaatgtatagttcagaggttgagtgctttcccagttataaagacatgtttgaattttggcagccatattcatatgtttattagccttttttattgagacttttattttttaacatttttacttttatatatatgtgcatgcatttgtgttgggatggccgggcatgtgtacatatgggtaagcatctttggagccagagggttgatgcatctgaggctagagttataggctgtggtaagctgcccaatgtggatactgggaatcaaattcatgttccctgcaagaggacatgttcttaaccactgagccatgtctccaacataattgagaagtcttaagagcaattatgttctcttgtcaccgggcatacttagctttagttgttcaagttcattctttacaacaaggaaacatggttccttggatgagtggctgatctctgggaatggaacaatatgtaatcccttaggtagatgtagtgacaaaagcttgtgttcccagcactcaggagtcaaaagcagaattgtgagctgaacagcagcttgaacaacactgccagattctggctcatagaaaaggggctggatatgatggcacatgcctttaatcacagctctaaggagacagacgggcagatgtcaaaggctagccagagctacagagtaagaccctgtctccaaaacaaaacaaataaaaggaagaaagaagggggagtttagaatgtctcaaatttctagaaagtacagattttattaccgattgaataaataaatacttaaatacaaaggggagatagtaattgtccagaagaaatgaacaggaaaaaatttagtattgaaggctgttgaagatgtcttgggaagacaccaaaagcataagttatatacagtttctaaaattagtgaattgtaatagatgtttgtgtgtgtctcctacttataattctagtacttgggagaccagggcaggagaaggctgtgagtcctagattcatctgggcttcagagagaaagactttgttcagaaaaataaagctgagttactgaatggtaatgtgtgctttcaattcaactcttgggcagctagggcaggggaatgctatgagttcgcagccagcctgattacacagggagttccagacaagctgcaaatacatagtgagacctcctcttaaaataaaaggcataaatgaacattttaaagttttggagaataagatcaacagattgactagggaatatatatttgaaataggcagactagaaaatggacagaaggtatgaatacaaaaggcagataaatgtgaacgtgaaaaacatcattagctattagaaatattagtatgtacttactaaacagagggcatactacctcagggctgcagaggagcttgatagaggctaatcaagctgatagcaatggtgtagctgtatccccaaaatctcccaagtcaggggttctctttgtaggctaagctggccttgaactcagaggtttgcctgcctctgcctcccaatagctgggattaaaagcatatggcaccatacggtgatacgactatttttcacaaacctgaatttacacttctgtgacctagcaaaatagattttttagcatcttagagaaatgaaaatcctattcttacacagctgtgtaagtgaatgttcataacagctttatttggaatttaagctcaagtgatcttaaattgggaacaacccaaatgcctttcagtaataggtgattagtaaatttatattgttggatattgctaaacaaaccattgatgcacacacacacaaacacacacacttgggtagatctcaaagaatttagattgagagtatcaggagattacataactatatttttatatataatttaaaagcttttattattgcctgtggatttatatatgtcatggcacaacaatggaagtcaaaggacaaattttgggacttggttctgtaaactcaggctgtcaggcttccatggtgaacactttaaatagtagctatttaccagcctctatttaacttttttttttttttttttttttttttttttttttaaagatttatttatttattatatgtaagtacactgtagctgtcctcagacactccagaagagggcgtcagatcttgttacagatggttgtgagccaccatgtggttgctgggatttgaactctggaccttcggaagagcagtcgggtgctcttacccactgagccatctcaccagcccaacttttttttcaaggcagggtttctctgtgtagccctaaaactcactctgtagacctgactggcatcaaactcggagatccacctgtctgtgcctctgcagtgctgggattaaaggcctgtgtccagctgacttttttttttcttcttctagatggttggttgtcctagaacttgctgtgtgatcaccagcctggctcatagagattgacctgactctgtccttcaagtgctaggactataggtgtgtgctactgcgcccagcctatgccattcctgaagtaatacagtgtcagtagtggagactgtgtttagtgatgcagttagaggtaggggtgagaggaatgggactcagtgtgaaatagcacacagtacctttggtgatgtaatagttctatactacaccatagttacatacatatataaagaatacacagaaatgaatgcctgtaaaaatgggagaattccagtaaggtgtgaattggaccaatatctttccatggttttttaatttaatagcccgttgaagttggtcctgggtagcataatccaggcgaggtgggagtcagtgaggaacataatggttctgattaccaagagcttcatcttaaaaggcaaatcataatgagttcagggcctgagggaatgttccttccttgctaagtgactgagaatcttgtcctacggtagcattttgagcaggcccgtgtagaagccgcagttcattgtctggaagctctgctggagaacgtgtactggatggtgcagccacagtgcacgtggagagaactctgagtggggatgcatggggtgccctccagaactacctgtatttagaacttgggggaagatgaatgaagcagaagtttcaaactactaaaatcttttagataaaataggaatgtcagagaatttgtagttgtcattggaatgtttaaggctgagtctttctgagtagtcaagccgctccatctgtcgtttccttcatatgctgttttcttttgcaacactctgcttaacatggggtgtgattgcaagtatgtggcctctaagagaggaacctagtattacattgaacctagtattaaattaattggacatgattttgtttaatacaaacacatagactgcaacaattgtgggtttaagacagagtctcacattggttaggagttgctgaggctgggatgattttgaacttgtggtatttttgctgggatgacaggcctatctgttaccatcctggttaggagggactaggaagttaaagctctggtgttctaggccagcactctatcttttgagctacatcctaagcactaggactctagctcagaataatggaattgccttatttataggccctagtgaggtcaaagtcctccttagtcaatacatggaattagggtgctaatgattgaacatgaccttatggaaactcttatctagaacttccttattcctcttctaagtctgatcacacagtgtgattggggttgttcagtagtctgtagctgtgaactgttctgtgtgattgaaatccttcagtttaagtccctctagtctgaaaagaatgatgactttctacctgatggcagcaaaaagggcatgatagtttaccatctgctttataaggttatgaggattgaggcggtgaccgcctagtaagatgcgtctggcatatcataatcactaaacagtgctttctgctagttcaagttgattgtatggtcagtgagaagctatttataggtttgtttgttttttttttaaattgtaagtaagcaggtgaagtgttcagacttccatatgtgctaagatttatatttcttcattaaaatgatagtggttatgggacttagatttagttctgtctttgtgtaggactccttgctcagtttatgaaaaaaattatatttattttatcagtttttggagttgaacagtgttgacatagttataagatgtgctgagttcttatcaggaaagtaccccaagtagagattaggaaaatgtaaggaggaaaaataaccagtaatgctatcttaatagaattgtcctgtatttgctcaacttgtgagttcataattggcttctgccatgatgaacatgaaccttgccctctgtttgacatgtgacactctgcagtagcagaggcgtttacgacagtgatcaatgggggaatatcctctgctcttgttcttttcagtttattgtgaatgttgaaagaggaagcttctgtgtgcgttagccacaggctgagcaagtcatttcttgagagctgagacaatttcccagaagacactgagagtgggaggcagagagacttcgtcagaagtgggtgggcataatttttaatccaatgttttagttacagtattgttagatattaaatttcataattcactaattcactcaatgataacaattaagaacaaataatatcctacagaataataaactgtgttccttacagtgctgctgctgctggtactgttagaagtggagaagtgtgattcctgtgaaaaagtggtttcttaccttccccttcctttaccttttaaaagatgggtgggcaggggctcaggaaggtgcgggagaatatgaatgagccacagaaggctgagcaagtactgtgagctcaggtgcctttggtgatctcactttagagaggctggagggaaaaggtggaagagcacaaagcatgtgattttctgacctttttaaattgtaactgtggagtcaaatgtttccttgttagaaataaacaagtcagggctccaaagagcaggaagggaaaggactcaagttcctggcatctacatctgtcagcttacagggaagccctttttggcctttaaaagcacccacacactcatggctcacacacccacatacatatatgtagtgaaaaaaataaatctttaaaagaaaattcaagccgggcgtggtggcgcacgcctttaatcccagcactcgggaggcagaggcaggaggatttctgagttcgaggccagcctggtctacaaagtgagttccaggacagccagggctacacagagaaaccctgtctcgaaaaaccaaaaaaaaaaataataattcaaacagttcacagatttgggatcagctaacactactggaccagggaaaggaagcagttaactcccgggttgggagggaacctgcatgtttattcagactgagcatgtgtaagtgattcctgcctgcttagtgaatgccagggtcctttgtttttgttgagaattggaagttgtgaagtcacagtttcgcaaggttttggtgggaatttcacttcctgaaatgtatatatgtgtgctctttgttagatatttcagggtggtgtatattaattaacaccaaaaactgtctatggttttctttttagaatctcttttgaataaaagtttgtgtgtgtgtgttgatacagggtcttatgtatcaaaggcctggaattcactatttagaccaggctggcctagacatagacactgacagtgttaacagtgtgtgcaccatgctctgttctcacagtctttttcatagaactaaataatgacattgctgtgtatctgagagtttgatttcctgataagaacatataaattggggctggtgagatggctcagtgggtaagagcacccgactgctcttccgaaggtcaggagttcaaatcccagcaaccacatggtggctcacaaccatccgtaacaagatctgactccctcttctggagtgtctgaagacagctacagtgtacttacatataatcaataaataaatcttttaaaaaaaaaaaaagaacatataaatttagtcaccagctgtgcttaattctaaaaacctattatgttttcctaaagattacttactgttttctattttcgtctgccaacaaaactttaaaacttgttttctaaaccccatagaatgcagttttcctttgctgacttgataacttgttaggaagtgatgcaaagccctgtagttgcacaggaccttgggtgactttcacgtagtagccagtgcactgcactgtgcttttagtcattgggtatgattactgcaaagttttgggttaaagactgaaagaacatatctgaattccaggaacagagaccactgcttaagctgctagcttttttctagtcttagcgtctaaaccctgccttggtctgggaaggcattatgtaggcaaactgaattcctagcaccctgtgtggggccttaacatcttgaggtgtgttggtcaaaagactgtatgatttgtgtgtgttttggtttgtattcttcctgtgattgcaacatgagggaatgcatccctttgcaggatactgttgtggaatttacatttttgtggttgtattgctttctctaagagcttacattcttctgttggtgtgctatccaggaaacataatggtctttattctgttaagtaggaagctgtccagtatcttgtacagtgtgtcaattataagatgactaagctgttaagaaaacaacaattaaaaaaaaactttttaaaaagtgcttgctgacatcatctttccccaaagactaattaatatatgtgtttactatagcaagatcatagttgttctgttgtcaagtgacatgtagtatttacagaggccttctgttcagtccaacaggagcagctgagatagattcatacggaaactaaagatatttaacatttttattcatatgaagaatagtgtctttgggtcttattgctgtggagacacatcatgaccatggcaaggcaactcttataatggaaaatgttgaattggggcagccttacagtttcagaggcttagtctgttatcatcatggtgggaaagaaacatggtggcatgcaggcagacttggtgctggtgaagaagctgagagttctacatcttgatccatagcagcagaaggtgactgtatgccatactgattgtcaccttcctccaacaaggccacacctactgcagccttctaatagggccaatccctgtgggcctagggggaccagttaccttcagactatcataaatagtttagacagtttggggttttgttttgttatagttgtctggattttggtttaaaagtggttgctcaaaagctagttaaaatagcacacacctttaatcccagcattccaggaggcagagtcaggcagacctatgagtttgaggccagcttggtctaccacaaaaaggtgtggggaagagggagaaagaaaaaaaaaagggagtgagtggtgaggttaggagtagcctaaactggggagaggtagtggtaagaagattaggattttaagatcattctttgctgcatattcagttgtgggccagcctgggctacatgaggccctagcttaaaaaagaaaaagccaagagacagtggaaagagagtgactatttagtatagatttctttgaaaggagtagtttatcacaaactatattctctgaagttgaacattatacattctgttagtaacttagtttatgcttgtgtctttttttttttatgtttacgattcttaattaaagttcatcttggggataagtgcttacatgctcctcatctttttttttttctcatctaaatgatacaagatgttgtattttagatgttgaaattagcataaattctaaatccgaaaattttatttttaaaatgtagaaatgtgtctaacctgttaacataatcgtaagtaatgaagtgtttccagtactcttgtaaagaatacagtttgggtgatccagttattttagcttttccgtgttaagaattatttaaatatacttgtatgcatgctaccgggaaatgataagtctgttctcagtttgagcccagttatggttttgcagttatggttttcctcagtccctgggcactgagacttgagatggcgtttcacttctgggaaggtaagtgtcttcttcactttactgcactttactgctgggcagtgtctcaggttactgtagatagagtgcaaacagaagcactttttttccaacacccagtaacaggattatagtctcacttccttattctaaaaatagaaataggtaatttaggacatgtctcaactctcctttggtattaatttatgttttctttatttctcctatcatctataactaccttaaaatattaaaatcaaataaaaagtatgaaaagttgaaatgacagttatgatttatcattctctactttcagatgatcacagtcgtgttaaactgcaaagtactgaaaatgattatattaatgccagcttagttgacatagaagaggcacaaagaagttacatcttaacacaggcaagtggtatggtgctgagcagaggtggaggggctgctgtgtttcagacacggctaaacatgggtctggacatctgcaaatgacatgctatcttttagttttctgattctgaaatcagttttgcaaatgccatagttttcagatttcgaatatattgataaaaagtaaaattgttcctaatgttactattttcaatggagggaagttttttgaaatgtcttggtgcagttctcttcaggtaaattgactgtatctaacatggcttggagttcttgtcccctaacttgtgatgaagaactagagaggccctggaagcccttttctatccttctctcccctatgaatatactttcagagagtatagtcatggatgctgaggatagggtctgaccatctgcagagcctagacatttgtacactgctgctctgctgccttttctcctccccagtggctcctcacagcaacctccacagtgcaggaactaggaacttctgagatcatagcttactctttatccagtaagaggctaaacagcaaccagcactgtcacatttcccagtcaaagatgttcagaaatgtaacttaaaatatttgagagttttaaattgtatttgattattatgtgtctctgtgtgtatatttatatatacatgtgcacagggtgtccacagaggacaaaaagaagtggcccttagcactgaaattacaggctgttgtgagctgtacaacatgggtgctaggaatcgaactctggacctctggaagagaagaaattgtccttaactctatctatagtaccatgtttgaggtttttaaaaagccaagaggttaatgcaacctgctatttgaaggactgagaaaagtgtgaagtaattgtttttttaagttcagcctaatgtacctgtgagccattagaattttctctgctacagaaacattgtttcacttgaagtttcctatgactaaaaggaaggagaaacagtcaggtgtaaaccttgttaaggatattaattcacaattcataggacaaaagaaagctagagaatagggctggagagatggctcaaggtttaagagcactgattgctcttccagaggtcctgagttcaattcccaggaaccacatggtgactcataaccatctgtaatgagatctggtgccctcttctggtgtgtctgaagacagctatagtgtactcatataaataaaaataaataaaaaatttttaaaagaaagctagagaatatacatttgcaaagatgctatgtttgtacatagcataaagtgggcccagtcactgagcctccaccaaggactcagctgctttcccctcaggccgcctctctttcctctcctcagatcttgtcctgcccttgccccctaaccttccttctatagtcactttctgaaggtagtttacacctaggagaaggagtgtttgtgagtcctttgagaacttttactctgttgactcctttgctcatccaaataagagtgatgagttgcttcctgctaggcacacacttgagatcaacagaattagcaggaatatcccaaccgccactctgggattgctagtgtccatgcagctaggtgtagcattatgaaatagatttgcctgcagtggtaattcagctatactgagactaattcctgaagagacaatagtagttcattgcagggagagtatataatactcagtggtcacaatgtgcttgagaaactgacctgagaaattctacatgtgtttattccaacctcagtttcacaagagggctggcatgggttgaatgatgaatcatacacataccttttagtagccgtctttaatgcgaatggggagcataaactttaatttgctgttttatagtgagtgaaatttatcttatgtatagtcataatcatttaggatttcaaaaaaattcaagaaatctatattcagaactgaaaatggactttgtactgagaatgagtgtgggcatgtggaaaggcatgtgtgaagttaggctctcgttgctatgacaaatacggaaaggaaaactgaaaaggaaaaatcatttatttggcctcaaatttccagagatatgactcaaggtcagctttaaggctaaggtgaggcagaatattgtggcagtgtggacgaagagagaaagagctacatgacaagggcattcctgtgacctgcttccccctcttaggtaccacctcctagtcctggtacactaatctaccaacagattaacctttgattaggccagagccctcccaagcatccatgagatgacatcaggcctgcagcactcgagccccaggtggagcctttcccacctaaaccgtaatacagctattccttctcctgccctttccctccagatcattgttcttctttttccttttactcagttcctacagacaggtctgtctgtctttttttttcttttttttttttcctcttttttggttctccaagacagggtttctctgtgtaactctagctgtcttggaacttgttctgtagatcagaccggcctccaactcagagatctgcctgcctctgtttctctgagtccagagattaaagtcataggccgccacctgggctaatgattgttttataagcatctatatctcatatgaaaaaattcctgatgaacaattccatggtttttaactcagttatccctgttggactgttctcatgaatcctgatagacaggactctacacactaggagtgtgagaatatagcagcttgtctctagatttttttgtttatttgtttgtttgtttttttgttgttgttgctttggtttttgtttttttcctgatttcctttctgtattctggtgtacttttcccagttttctaccctggccttatgagttgctcagttccacacacatcagtgcagcattctaagatgtttccttgcaaccagctcttcagacatggttcgctactgtgatactcccacatctaccatgtgccctggttctttgtgtgcctcaccttctgcttaggacatgcagagtgaccataactacccatgtcctgcctatcacctctctgccagacttgccttcctttggctagactgtaaatcctcaggttttcttacaacataaggcctgaggattgagcatttggtggtagtgatgctcctctgtgcaccttgtagggctgagactacatctcagttgtacttgtgcatagcatgttacttggtcacagagaaaacctgcaacatttagtgtttgttaactacagtggtagtccttgttgcttattaattagattagctttctttcccctgagttttaggatttcttttcctaaccaaccccttggtatatcatgtccattgtacagtttaaaaaattggtagcattgctagtttttgaaagaactgatacacgaaaaaattcttgtcttcttaaaatcctttattctttatactgtaacagctgttgcatgtttattggttagtctttaaaagcagtattagaaatgatgtattcatgtgcacacagaggacttcactcctgagttgcttcatgattttttttaaagttttatttatttattttaatacagatggttgtgagccttcatgtggttgttgggaattgtttttaggacctctgctcgctccggtcaactctgctcaactctgcttgctcagtccctgctcactctggcccaaagatttactacactgtgtacacagtacactgtagctgtcttcagatgcacaagaagagggcatcagatcccattacggatggttgtgagccaccatgtggttgctgggatttgaactcaggacctttggaagaggagtcagtgctcttttccactgagccatctcgtcagccctcatgatttttttttaaagtgtactttattttcatatctgtatataaattcccaatgaggccagaagagagagatctggagctagagatatgagtaactgtgagccacaccgtggtgtcctttgaaagagcagcaagtgcccctaacaaccaagccatctttctagtcctgcttcatgattgttgtttttgagacaagatctcactgtgtagccctaagtggcctagaactcactgagtagacaggctggccttgagctacagagatcctcactcttctgggattaaaagagctcaactgggcccatgcgccaggcgtggtggtgcacgcctttaattccagcactcgggaggcagaggcaggcagatttctgagttcaagaccagcctggtctacaaagtgagttccaggacagccagggctacacagagaaaccctgtctcgggaaaaaaacaaaaaaacaaaacaaaacaaaaaagcctaaaaaacccaactgggcccatgattttttttttaattttttttcttaaaaagaactaattattttattcaatacgagtacactgtagctgtcttcagacacaccggaagagggcatcagatctcattacagatggttgtgatccaccatgtggttgctgggatttgaactcaggatctctggaagagcagtcagtgctcttaaccacagagccatctctccagcctccccataatttttttttaagatgaaagaaaaaggcatttatgttactgggggttttctcagtgttctttttggtagagaagatgatgttggttcacctcactgtatgctttatattgtaagtagatagtgtacattggatggagagaatagtatcctttaatgtaagggggtcgtttctcagattactagctttttacaggtcaacccgagagtttatccatctaagtgattggctagacaccaagaaataatctgccctaaagatgatttaccttctaattggggtggggtgtagctctggtattgtattctctgccacatgacactggtagttggttacatgttacagttactttaggcacagtggaacttagttctatttcagccttcactcagaattattaaggattctgtcttagtcagggtttctattcctgcacagacatcatgaccaagaagcaagttggggaggaaagggtttattcagcttacacttccacattgctgttcatcaccaaaggaaatcaggactggaactcacacaggcaggaacctgggggcaggagctgatgcagaggccatggaagtgagctgcttactgccttgctcagcttgctttcttagaaacccaggaccaccagctcagggatgacaccacccacaatgggccctcccaaccttgatcactaattgagaaaatgccttacagctggatctcatggaggctcctttctctgtgataacttcagctgtgtcaagttaacaaacaaaaccagccagtgcagatgaaggtcggttgttagagtatctacctagcttgtgtgaggccctccgttacatctccagccccacataaaggaggaaaggaagtgacggttggacattctttttcatctcatggcttggtttttttgtttttgtttttgttttttttttggggggggtggtggaggttgtttttgtttttggagacagggtttctctgtgtagccctggctgccctggaactcactctgtagtccaggctggcctcgaactcagaaatccacctgcccctgcttcccaagtgctggggattaaaggcgtgcgccaccatgcccggttcatctcatgttttttattttttgttttttatttttttttgttttttcgagacagggtttttctgtagccctggctgtcctggaactcactctgtagaccaggctggcctcgaactcagaaatccgcctgcctctgcctcccaagtgctgggattaaaggcgtgcgccaccacgcccggctctctcatgttttttaaaaaacccctatgctatcattaatcgaaatgtaaaagtaattggaagtaatatatttgatttttcctcctccattgcattttgtaatatgaactattattcacttttaattctgccagatgatactaggcataacaaaccaatatgcaggtactttcatggttatttttttttttcctgcaaattcttttgtattgacttggggttgttggttggttagtaatgaaataaacttccctattttccacagttccctgatgtttgtgtgagatatcacctgcctgttacagaaactgaaagagacagatttccttttctaacagcctttttagctagaatacgaacagccaggtggtgttatactgtaggcacctttggtaataacagcaaagccatatgtaataagacagtgaactgtgtaataataactatataataagactaatgaacaaggctggctctgtttcggacagaaatcttagctgtattttatagttgttatttgaacctagttatccagctcttcccataagccctatatggttcttttcctgccaaggtaaagaaaatgtctttacatggaggtaaagttttattgaatgcacactatattttggatttaagtgcatttgaagtcttaatttactcatcaggccccaatgcactggttataacagtgtgttccagtagcatccttgcagccttgtccttccccagcccctctctcatgtggtcttctgtcgttacagggcccacttccgaacacatgctgccatttctggctcatggtgtggcagcaaaagaccaaagcagttgtcatgctaaaccgaactgtagaaaaagaatcggtgagtattcttctcttctcttctcttctcttctctcctctcctctcctctcctctcctctcctctcctctcctctcctcttctcttcttctatcttgtttgtgtgtttgttttgttttgtttttttggagacagggtttctcagtataaccagccctggctgtcttcactcactgtgtagaccaggctggcctcaaagtcacagagctctgcttgtctctgcctccttagtgctaggatccaaggcgtgctccaccatgcctggctggtgagtcatattcaacattagtggttgaatatgccgcgtgtgtgatgtgtgatcgttatcttacacatttcttttattttggtgaatgcttgtggtggctaacagctagtggccaggttatttctttctttttttttttttggtttttcgagacagggtttctcttttatagccctggctgtcctggaactcactttgtagaccaggctggcctcgaactcagaaatccacctgcctctgcctcccgagtgctgggattaaaggcgtgcaccaccaccgcccggcagccaggttatttctgaccaggactaatggatactttgctttcctttcatttctttacagttttttaaaaatgcattttatagatttatagtaatacatatcttattctgctacataagcacattttttataagtataggtgatatgttgggagtattccctactttcagccctcctttctcccactctcctattatcttttttgtactccccgacagttctactactgcttttgtgtctgtctcctagattttgtataggtaggtaccttaaagcacacacacacacacacacacacacacacacaccacttctctttgtgagattgccatatttcatttggtacatttatcttagttgcatctatagttctgcaaatgacataactttgctgtttttggttaaaagttttcattctgtaaatataccacattttcttcatttttctgctgttaggcaagtgtattggattctcaatttaggttttgtgagtagtgccttggtaaatgtcaataaagtataaatctctctgtgatagacctaccttggacttggagtcctgtggttagatactcagaagtgatatagctgggtcatattgtaggtctatttcacttttgtgtagaacctctgtacagatttccatagctgctggaccagtttacattttgaatagcagtgtgtagcggctcccttttggtcacatctttgccagtgttttgggtttggttttggtttgtttagtggtagtggtgtcactgttgaggttttcctttattttgtgtagccctggctgtcctggaactccctgtgtaggccagactggcatcacagaaacctacctccttctgcctcctgagtgcccgaattaaaggtgtggattgctgtgtccaacagttctttcttttctacagtcatcctgactagagggagatggaaatgtctgtgcggtttcaatttgcatttctctgatagccagctagactgaaaactttttatgtatgtaatgacatttgtgtctcattttgtctgttcattagcccatttactgattgggttgtttgtctttttgtttaattttttcagttctttatatattctagctattaactgtctgtcagataaattaggtagcaaagatttttctcctatttggtagattctgttcatttaactacttgcttttctatgcagaaacttcttaatttcatgaggtttcttttgtcatctgtttgcatatttttcttaagtgagtagagtcctgttaaaagtcattgcctgggctggggagatggctcagcagttatgagcactgactgctctccagaaggtcctgagttcaattcccagcaaccacatggtggctcacaaccatctgtaatgagatcagacgccctcttctcgtgtgtctgaagacatctacagtgtacttagatatataataaacaaatcttaaaaaaaaaagaaaaagtcattgcctagggtgtctgtctgtatgcgtgtgcccacgctagggggagcagagtttattcttcagtgctttctgctttatattttgagaccttcttgggtcctgttttgactggactggttgtgagccctcaggatctgcttttatgaacccacccactcctccccagtgacatctgcatcagaaaccacatggatgaagctgccttggcttctctctgggttctctttctcttgggttggtttgtggacctgctgcttttgttactatgactgtgtggtatgccttgaaatcatgtctgattagacctctagtctttatgtttgttttcttttctcaggcttgcattgcccttccccccaggcctttagagcttttgtaagagcagtgctgggatcaaaggtgtgtaccaccactgccaggctaagcgctttaagatttttctgagatgtactttcaaatagcattggaattttgatggggattgcactgaatctgtagattgctttggatagtatagccggttttacaatattaaccagtctacatacttttcttcctttcttctttctgtttgtcaatattggggactggacctcagcctttatgcctgctaagcaagaattttcccagctaagccatagttcctgtgggcagagaaagtcttcagggttttgtctccccccccccctattgttgtagcttttgtagagatttttctttacctaggtttattacatggtattccttaatgcagttagaatgagcttctatccttcatgcgttgtgagcatgtttgttattgagataatagaaagacttctgattttatatattatatattaatttctatcttgatgcaaagacttctcattaatcctgaattttcttttgcagtctttaggatcttttaaaatggaatgattttatctgtaaagaaggatacataggcgtcttcctttcctgtttgtacctcactcattttcttctcttgctttacttatgattgagacttcaagtgtcatgttgaataagggtagagaaagatgagaacttttgtctttctcctgatttagccaacatgtttcagatttttctttggtgtgatgctggcttttgggttgtcatttatagcctttattgtgttgaaatatgttcttcctattcctagcctccttaggacttttattatgaagggatgttgttttaaatatcacgtatgcaatttctccttgagtcattttacgtagtgaattatgattggtgatttgcatatgttgaaccacccttgtatctctgggatgaagccaacttgatcatgatgaatgatctcttatgtcttgaattccattactgatacttattatagtgagaactttgcagttttgttatttgtgtgttggtctttgtccgacattattattagagtgatgctggcttcataaagtgaatttgctagcatttgttttgctgattcttagtattgtttctttagtttccatttcattcacttctgcgcaggtgttaattcttaccatcccctactttgggatgtgcgcgcatgtccagtttccatagctagcctatctgagatctctctgatttatttacttacttgacacttagagctataaacattcttttgagaactgctttgtatccagagagtttggaatgttgtgcaattctatatatttttctgtttccagcggctcatatttctttcagtggtgtgttttcttttttgtttcctttttgcttggtgtgttgttttcagtctgtaaatctgcatggtttctgtagtttctcctgttgttttgtagttttgttcctttgattttctataagattgtgtgtgaatgtttcctgaggcacacatctgctagctccaggtagggcatcagtgatagaaacaaagtgtagtttggcaagctaatgaatggataggtgtgagattatttttagaaacattgggaattaagtggctctactactaccaaagaaaaacaactctctgtgagactagtaatttttggaggcattgtacggccttggctttttatatttcctttgtttctcttttgtatatatgtatctgaggttaggctgttttttgttttttttgtttgtttgtttgcttgttttcgaaataagtttgtagtgttcagtaagatctgggttgtagtagtgttgaagtgtttttatctgttgggctctttttcagaacaccagactcaatatccagtaactcttgacagaagtattacacctttataaacaatcactaattaagagtaaacccattataaatatatagaaataatcaagtagcactcagtcgccacttacaccccaagcatttcagaaagtaaaggaagccttatagaatcaagccttgtttactgagctgctagttactgtgagtgtgactacaagaaaaataccagagtgcctcacagttggtattaggttaatagagaaaatctcgaggatgagattagatgagagtcagcaaggccaagtagaagggtgagtcagttttgcctaaaggtaggatggaaagggagagctaaagaaatggtttcaggggttaagagcaaacactgctcttgcaggagcccctagttcagttcccacacctatgtggtagctcacaaccatgttatttcagcttcagggggactcagtgtcctttctgagttcaccagacactgtattcacatgcacaccccctgcaccacacacacaaacacacacacacacacacacacacacacacacacacacacacacgctttaaagtatgtttttaaaaagaaaaagggccaggtgcagtggtgcatgttttttatctcttcattcaggaaacagaagcaggaagatccctgtgagttccaggccagataagtaagaccatgtcttaaaagaaaggaggagggctggagagatggctcagtggttaagagttccgacagctcttccagaggacctgagttcaaatcccagacaaccacatggtggctcacaaccattaaatcagacgccctcttctggggtgtctgaagatagctacagtgtacttacatatattaaattaataaaaagaaagaaagaaggaagaggagtggaggatgttatcagaaaacccaatatctataatattttgccagttcaaattataactaagatttatgtgtctttagactctttttctgtcaaaattagaaagtcttgactcttaagattatttccagtttaaatataccacacacacacacactcacatgctttaaagtatgtttttaaatctgttctatgacagatttctggttcttaattcttcctaaattaatagttactgggttttgatgataatgtgtatcatgacattggcctaacagaatttccaataattgccatctgtagttgttttccgtcctctcccactaatctagagattcaggggtggggcatagttttgtttgtttgaatgtgttgcaaactagatgatttgtaaatttcatccctctcacgtcaaagtagattcactttttttaagattcatttcttttatgtgtattattttgcctgaatgtatatatgtgcaccacataagtacctggtactcccagaggctaaaggaagacatcagatcctctggaactgggttaaggcatagtgtaagacaccatgtaggttctgagacctgtgtaggaggaacaagtactcttaactgctgagccattcctttagtcccttgtgggcattttaatctctggttcctttttttttttttttttttttttttgttgttgttgttggtgggggtggttttttgagacagggtttctctgtatactcctggctgttctagaactcactctgtagaccaggctggccttgaactcagaaatccgcctgcctctgcctcccgagtgctgggattaaaggtgtgcgccaccatgcctggcccttaatctctggtttcttaagtgtcagtgaaagtgcatctgctcttttagtacttaaacgtcattttggcagggtataaaaaacttagctcttgcttttacttgaatttaaatacattcttttcattttagtgttttagattactgtccaagtcaaatggatgtcatttttttttcttgtacctatattacgctggggttttctccctttttatttatttttttaaattttatgtttatgaatggtttgattgcatatatatatgctaccatgtgtgtgcctgttggatcccctagaacaaggtttatgggtggttttgtcccatcatatgggtgctgggactcaaacccaggtcttttgcaagaacaagaagtactcttaacaactaagccgtctccctacctagccaggctctctttctctttaacattaacttttgaaactgtatcttaccacttgattggctttttgcaagtaaatagttttgtcctttaaatagttgcaaatgcttttttttgtgtgtgaaaaataaaaagattattaaattatatttgggatttgttctgttcctgtttgtcattgctggtgtttttgaggggtgtgtgtgtgtattttctttgtatttgtcctgctcttgttaatcctgtttctatttctctctatttactgtaaaatgtccttcttgtcctcttaagctttatccattacacttatcctgcactacagttctaggtgtcaaaacaaaccaaaaggcttattcttctgattggctgtcctggaactcgctctgtagaccaggctagctttgaacctagaggaaagccgcctgcctctgccaaacaagtgctgggattaaaggtgtgcgccaccaccgttcagggtgacagaaagcctctttagtgctctctgaaataacattcttgcaagagcttgatacttctagaaactcaaactgaatatgttaaagtgtaattatgctttaagaacagcacacttttgggttgggcatggtaacacatgcctttaaatccagcatgtgggggctgaagccagcttgatgttcatactgaattccaggacagccaaggctatataaagagattctgtctcaaaataaagaagagcatattttaatgaatattttatgtttatggctttttaaatggaaaggaaacattttatggagctactttacagaatattctcattaaaatacttaagatattcttaggtttcagtacttggagaagtatagtatgtatgtgtgagatttgtttttatggttttataatatgtctaaactattcttaaatttaggttaaatgtgcacagtactggccaacggatgacagagaaatggtgtttaaggaaacgggattcagtgtgaagctcttatctgaagatgtaaaatcatattatacagtacatctactacagttagaaaatatcaatgtaaggcttttcttgtttcaaagtttcagttttatctgatggtcttaagaattcttgggggttgatactatacttacttgcctttggatatttgtaataatatctaggtataagcatgtttttagagtatttctatataaagtaactctttatgcattctgaagaattctaaaaacaacaaagaattacaatgttcaggttaatattaatatttaagaattgaaaattaactattggagctggaaggctggctgtagtgttcttgtagaaggcccaggttcagttcccagtacccatgtcacgaggcttaccactgcctgtaactcctgctctgggaaatccttgtataagaaaaatgctagaactaacttctccttgatttttacatttcagactggtgaaaccagaaccatatctcacttccattataccacctggccagattttggggttccagagtcaccagcttcatttctaaacttcttgtttaaagttagagaatctggttgtttgacccctgaccatggacctgcagtgatccattgcagtgcgggcatcgggcgctctggcaccttctctcttgtagatacctgtcttgttctggtaagtgtcatgcgatctcattggtgttttgtgcttctctgttttgttttatcattttataatgttgatgataaaaagataaataattttgcatgactggtgcctgaggaggttagaagaaagcattgagtccctgaaactggagttgcagatagtaagaccctataactcgtgggtgggaaccaaaccctgatcccctttaagagcagccagtgctcttaaccactctgcctgttaatttgtttttaactgtttctataggcagcagtaaattttgaagtaatatcccaaaactctagggttttttttttttaaacactttacttctatagtttaaattgactctagctcctgcaggtacatgtgtgtccatgacaattataaagattccctagaaagtctcaaccaggcttggctcgtacctttcatcccaacactaagtaagttggggcagaaaatttgctccaagtttgaggttagcctgggctacggagttagaccctatccaaaataaaaaaggaagaaatgaagaatacagtaaagtctccctcctaaaagggagaaatgacaaaggaaagcaatcctgaaagagtgactcatgcctgttgtctgcacgtctgagccagccggggttacctagtgagattcacctcaaaaaagaagagaatgccaacgaactggggccatggcaagcatgagcactgactcctagtgcatgggtaaaagatgagcagagtagcacatgtctgtgaccccagaacgtggtgaagggcagttaggtgggtttaatatagtttactgaccaccagcttatccaagtcattagctccaggtccagtaaaaaacactgtctcaaaaatggcttgaattctaccctagaccctactgggtaggagaaaactacctccaataagttgttgactttaaagatttttaagccactgtgctggtacctgtctgtaaccccttgcttgatagaggcaagagaagcaagtccatagagagtttgagcaagtctgagcaacatgagaatttgtttcaataccccctttctttctggtactttgtatacagaattaaaagcttctaccttcagcaataaatttttaaatttaaaaatgtgattttttttccttcttggataagtacatcatctcttatttataaaccaaggctaaaaagtacttcccagggttactgtgataattctgtatattaatgatattttctgtcctggttaacgtcagctaacaacttgacacagcccagagtcatctgagaggagtgcctcaattaaagaaagactttttaagatcagattggtgttatttgtagggaactaattgatacaggacagcccagcccactgtgagattatctgtagagagaatgtcttgtatattttatggatacaccacccatcaattaaaaagcctatggcttaggcaggaagtaggaggtgggacatcggggaggcagaaagagttctgggatagagccaggcacgggaggatttgcccaggaagatgtgaagagatggatgtggggtacctgaacacaggtaaccagccgcgtgtcagaatgtaaattaaaataaatgggttatgggctggagaggtggctcagcgggtaagagcactgactgctctttcgaaggtcctgagtttaaatcccagaaaccacatggtggctcacaaccagccataatgagatctgatgccctcttctggtgtatctgaagacagctactttattgttattattattgttgttgttgttgttattagatataataaaaaataaatctttgggacggagcgagcagaggttctgaattcaattcccagcaaccacatgatgtttcataaccatctgtacagctacagtgtgctcacatacattaaataaataattttttttttttttttttttttttttttggtttttcgagacagagtttctctgtgtagccctggctatcctggaactcactttgtagaccaggctggccttgaactcagaaatctgcctgcctctgccccctaagtgctgggattaaaggcatgtgccaccatgcctggcaataaataaatctttaaaaaaataaataaattattatgcttaaacaaaccctaatgggctactttaacattttgcctagacaagttatagtttcaatcaaaacttgaattgttagagctgagaggtggctcagtgatgaaggacagttgctgctctttagaaaactaatgttcggttctagcacccacagtgggtgactcacagccctctccagctccagggatcacatgctgtcttctggccgctgtgtgcatctctacacacttggcatgcacacatacacatgcactcacaaatctttaaaaaacaaaaaactcatttactaataaaattaaccttttgcttaaaggcagtagattctgttaatgatcaatattaaaactgggttatgagaaccggcggtctttggcagagtgtttgcctagcatttaagggttcatgagtttcaaactgcattggatgttcatacctgctctctaccaactgtgccttgctcatccttccttctcttcagtttatggtttgtttctaaaaccagatcagtagtccagagctcagaggtaattttgtaggtcaaggctttcctatttcctgccatcttttaagtgtctgctgtacatccacaaagcatgtctttgtccagatttgagatggggaagggcactgagcagcaaactttatctctgacaaaaccattttttaaaactatataaataatcctaatcatatctgggtgtctgtgtgcatatttctcacccccccccccatgtgtgtgtgttaaattatccttcttttaagaaggaacctgttcacagctaaggtctgagcagtgagtggccttatattgctttttttttttttcaactcaaacaacttggttttacctttcttgcagatggaaaaaggagaggatgttaatgtgaaacaattattactgaatatgagaaagtatcgaatgggacttattcagacaccggaccaactcagattctcctacatggccataatagaaggagcaaagtacacaaaaggagattcaaatatacaggtaaactcagtatcattagtgtcaaataaccatgttccatctaaatcctcagccttcccctacttcatttggtagatccagctgactgtctagaattcataaaactttccacagttcaagaggcaaagatgaaagctagtcaccaagagttcaagaccagcctggtctatacagtgagatcctgacttaatttttttttttcttcaagatttatttattattatatctaagtacactgtagttgtcttcagatgcaccagaagagggcgtcagatctcattactaatggttgtgagccaccatgtggttgctgggatttgaactcaggacctttggaagagcagtcggtgctcttaaccactgagccatctctccagcccccaatttttttttttatatgtatataagacacatatatacatatatacttgtttcctcagtggaaacaagattcaattaaaataatttttttcatatgagaagatttcagcatttaattattgaaagaaaaaaaaacccagaaaacataagtacttttatcttagtaaaaacttactgtagaggcctgaggagatggctaagtggtcacaggttacaagcacttactgctcttccagagcacccaagtgtgtttttaagaactcatgtcgggcagctccaggggatccagcatctctggcctctcatggcacttacagtcatatgcacatacctaaatgcacacacacagaactaaaaatgaaggaaatagccgggtgtggtggtgcacgcctttaatcccagcacttgggaggcagaggcaggcggatttctgagttcgaggccagcctggtctacaaagtgagttccaggacaaccaaggctatacagagaaaccctgtctcgggggggaaaaaaaaggtggaaataaaaattttaaacccttcatgtgggagtaaagactatttctatataggtactttatagctgaataacttcagttcttactacagacataaagtgctaggagtaaactttacaaactttacatgtctgatggtgacattctcaggtggtgtcttttttttttttttggttttttgagacagggtttctctgtgtagccctggctgacctggaactcactctgtagaccaggctggcctgaactcagaaattcacctgcctctgcctccccagtgctgggattaaaggcgtgcgccaccacacccagctctcaggtggtttttattgtatatttatagaccgtaagctcaaagagtatcagaacttagtttcatgtgataaggaaaagtgtaaggtagaaagagaaataacagtatatccttccctgcatcgtctgcataataaagacatacctagatcgaaaccaacaatcttaatccactactctttgactatctatttataaatatctgctttaaaatagaatatatcttttagggggctagagagatggctcagcagttaagagcattgactgctcttcctaaggtcttgagttcaaatcacagtaatcacattgtggctcacaaccatccgtaatgagatctgatggcctcttctgatgtgtctgaggacagctacagtgtacttaaatataataaataaatttaaataaatagaatacatcttttaaatcaattctatgtgattattttaaatgtctatgaatgtgtttgtgtttgtgggcaagtgctgggataaaagttaatgtcaagtttacctgtctgttccctgcctcatattgagtaattgcaatttgtagattgtgatttaaagaaaacaaattttattgttttttatttctgttctatacctagaaacggtggaaagaactttctaaagaagatttatctcctatttgtgatcattcacagaacagagtgatggttgagaagtacaatgggaagagaataggttcagaagatgaaaagttaacagggcttccttctaaggtgcaggatactgtggaggagagcagtgagaggtatgtgccatatatgtgctagcctaccgagatatgcgggtagtcactacactcagggagtctgcgacaggaccaccctgtgttcagacagttaatgctccttttacttgtgtcagagtgtttaggtggtatgtgatgacataaatatcttcagagagttttccgtcatcataagaaagccggtacagggcggggcagtggtggtgcatgcctttaatcccagttggtggcttactaccaacttaactccagcttttttgggatccaaggtccttatggtggtttgagtgtgcttagtccatgggaagtggcactattattggccttgaagtggctttttttttttttttaagtttatttattgtatgtatgtgagtacactgtagctgcacagatagttgttgggaattgaacaagggctcactctggtcagccctgctccctctggtcaactctgcacgcttgctcagtccctgcttgcacctctaatggcacatacctaaatggacacacatagaactaaaaatgttggaaataaaatgttaaaacccttcacgtgggagtaaagactatttacagtgtacataagtacactgtagctgacttcagacacgccagaaaaggtcatcagatctcattacaggtggttgtgagccaccatgttgttgctgggatttgaactcagggccttctgaagagcagtcagtgctcttcccgctgagccatctcgccagccctggagtggctttgttggaggaaatcaatcattgtggggatgggctttttgcggtcttgtgctcgagccccacccatggttgaagagattaggctccaggctgcctggagaagacagtcttctggtggcctttggttcaagatgtagagctctcagctcctccagcaccatgtctgcctgcccactgccatgcttcccatcatgaggagaatggactgaacctctgaaactgtgagccagccccagttacatgttttgtttttataagagttgccatgatcatggtgtctcctcacaacaatagaaaccctaagacaagcctccttaggcttttggttttttatttttatttagatttatttaatttacatgtatgagtttttggctgcatgtacaccacatgtgtgcctgatacacacagaggccagaagagggtgtcaggtcctttaaactgatcattcagacagtgaactatcaagtgaatactgggaattttccctggctcatttgcaagaacaagtgttcttaaccactgatccatttctccagcccaagaaatcaaaatttgaaaacatagtaatgataaatttaaaagctattgtttagagacaacaaaaactccaatactgctcatatacagaagttagtgtaattaggtgataaaaataaatagtataatacagaagatgagttgtataaaaatacctaattggccgggcagtggtggtgcatgcctttaatcccagcacatgggaggcagagacaggtggatatctgagtttgaggccagcctggtttacagagtgagttccaggacagccagggccacacagaaaaaccctgtctcaaaaaaacaaaacaaaacaaaaatgccggccagcaaatagaagcctaatgacctaagtttgttcactgagtcccactgtagaaggaagatacccaacttctcacagtgtcctctgacctctacaggtttatacctctctttctcctcctccctctccctccctccccacctctcatgcactcaagcagagtaattaaataaaaagagaaattcagagctgtatgcctatccccatgcacttaggaggcagaagcaggagaatctcaagttcaaggatagcttacatactgcgatcctgtctcaaagcaaatcattaatcctatctatatctagtcaaggctcatgcttggatctgaatgagacctgatgccttggtgttcttagtcagaacagatcccccacttttttctcctctgtttgaaagatgatcttttagcatgccttatagtttggatttctctaataattgttcttcttggttagaatcaagttaaatgttttgactagaaaaggtcttgtgatctagtagacattgaagagccagtcaagattttttttttaaatcaagctgcatgttcaaagctgtgacttaaaaaatgactgccaagccgggcatagtggcgcacgcctttaatcccagcacttgggaggcagaggcaggtggatttctgagtttgaggctagcctggtctacagagtgagttccaggacagctagggctacacagagaaaccctgtctggaaaaaccaaaaaaaaaaaaaaaaaaaaagccaagactgaagcactcacagtgagtgaaaagagatgggttttgtgagatttttttttttctagaggaagagagtaaatggctgacatgttgacattggccatttttcaatggatgtcagagaactttcattgaaacaaaattctatgttggacaggaaaatgggtgctagatgtacggatggtcaaatagaagactgggtaacctccaaacacagcattcatagaaattgtcaacagtatttgtcaaaggacattgaattttcatatgctgtcacgcaacaggaccagatgctgagaatctccagtctgtctccttcgtggtagagaggaaagcagagtgtgcagaaaacatgtctgtcttagcttcaggtcctgtaaaagcgttacttactgtaggcacagcagacgtgaccctgaactgtggagcacaccactggcctgtggagccgcttgtccttccctttgttactgcagtacactgaatgagatggaaagcatacaaatgagtgtccatggtttgatggtggcctgggccccactgtcagtgtgatgaaggcctgcagtgcagacactcacttgtttctgtctattcacagcattctacggaaacgtattcgagaggatagaaaggctacgacggctcagaaggtgcagcagatgaaacagaggctaaatgaaactgaacgaaaaagaaaaaggtggttatattggcaacctattctcactaagatggggtttgtgtcagtcattttggttggcgctttggttggctggacactgctttttcactaaatgttctataaattaatagttttacccagcacctttctgcactagtagctgaccgtggtgcattaatctcaagggtttgttagcaatgcctcatacccagaaacactgcgctagagtagacatcagccagataagggatattacagtcacaagcccagcatctcaggactcatcactgcaggttcctctgagacccagactgtcaatggctcacaataaagacaagcatgcttgttggatactgttacttcttacagctgcgttcacaccagtgtattgagaaatcctttatcccaaggattggcttttggaggccttctggattttaacctgcacttgatataagcaataaacattgtggtttttttctacattattaatggaaagaaaatatcctttaaacaatgtatgtaatatgtaatgtactgttgaaatgggcattacaactttatataaccattttagggtaaatatattttataagtacctatttaatcttacttttgtagttaaatgtactttttaaaggttcaatctgaaagtctgttatcatagaaaaataaattgtatgttgactcagttgtatactgaatacattttccctttcctaagcagacgtttgatagaggcagttgaaactataagcaagctaagactactacacattcttatttcctttctatttatgctttatcttattttaaaaagaaaaacaaaaattttctaaacatgtcattgaaggaaattgtttttttctgcgatagttaagaagtgacagttggtcaaaatatagttgaaaacaaacaaaaacttggtttctgcaggatgtggtagcacacacagtgctcaggaagctaaaacaagaggctcaatggtttgaagccagccaaaactacatagcaaggtcctatctttaaagataagagaaaaatagaggtggtggaggagagatcagacaacaccaagaataagaaatcgattcttagccatatttaatggacaaacctgtcatctcagcttttgggagatagaggcagaaggctcacaagttcaaggccagcttcaactacatagctagccccagagtttggggccagtcaggactgcaagaaacactgtctcagaaactgaagtggtttaaaaacattttgatttctgtaaagtaaagcccatgcatgactacactgttaattttttgtgaaaatgtaaatgtaattacccagacgggataaattatggttagtaagttaaaggaaccagtgttttatacttttgatttcagttcactagactgaaattttgaagtaaaaaaaaatttaatttctttacaagttcaataaatagtacaatggtgtacaaacttacattgtcccttacctttgtaatgagtatttttaaagcataaccactaattgggttttggtggtttcaaaccctgcttggtggaaaggttccaaaccattaggacagcattgctgcttcatctcttttatatatcacgtaaaagtgcgtggtaaatcttaattagtttaaatgagacagttaatttcttaatgcagtttgaaccccataggtgtagttagaaattgtgaatggccttgaaaagcatctcacaaagcgtatgatgtatgtgtgtgtcctgactcagcatagctgtcctaaggctttgaaatggagagcaggtaagaaggatgtttcctcttgtctgtttaatctctgtttaagcggaggccttagaattagatggctatgggttttgagctttctaacacttactggtttgtttttccaaaatgtagtatgttatcctactagaccttattaaaacttacagtccaagccaataaggtggcgtacacctttaatctcaacactaagaacaccaagacagacagatccctgtgagttcaaggctagtctggtccacataataagttcccaggcagccagaaatagacattgagatcctgtcttgaaagaaagcaaaccaactgaagatagcctgagcttaaacaacttcccacaagaaaaactgataaggctgagaccagtccttccttggacgatatgctttctagagatagcattgagcaccactctttctgcctcttggtgtgtattttatgtttgtgaggattcctttggcatacggaaccctcagtgctcctccccggagcccgtctttctcccctgaacacatctttaaggatgagttttaacaggagaacctttaagtcacactgtcatgttgcttactaaaggtacatggcctgtggtgacagtgtcactggcatcatcctgagcctgtatgagatgtgctgtgctgatgagagaagggtgctgggcagagaagggatactagcagtttctgatgggttcacggctttaaacacagtgtgcgtcagtctcggtagcagcttattttaactaatttaggaataatagtttgtcttggatcaaattctgttttttgtttgtttgtttgttttttgtttttggtgtttggtttttttttaatttggggaaaaaataggctttttaaaggggattattgtttactggaaagaatcctcacttcctgtttcctcccaccttgctgtaatgtcagtggtcacaagattcaccaggtactgtgttatctcagcctcctgatttctatccatgctcaaacctaaagtgtaaaagtacacattcctttttaaaaatacgcatatgcatcatttctacgttcagcagaatctacacatttgtcaagttttccacagttctcagttctttttatccattccgttatgtgtcacctcatgtatcaaacagtgaacataaaaagatatgaagacctgtattaattagtttttgtccaaacagctgtgctctgaagctgcgtcagaggaaaggtcctaatttctgagctcagcttccatgcactcggctcggccctttgtcttaaagtaaagctagtgctgtgagtttagaactgtggcccacgtttcaagttatgacacagaacagccctctctggttgtcatttcatttccttgtttgcttttagcaccagtcccagggtgctggctcccattttctgccaggcacagaaaggctacagctgactgctttaaaaatagctctgcgtagattctgcagagaagctggaacctaatggtagtaaaagtacttttttttggccattgtatacaatctacttaacaagtttacatttctgtcaagacattgcagactgaagatctacattgccttaatttgttacttactgatacaaatctttatttgtagttgttgttttggataggtttgtatattcttttttttttttttttttttttttgtatgtgtgttgagatagtaccttgccattgcccaagcctggccttaaactcagctcaaacgactttcctacctcagcctgttgagtaactaacaccacaggtacacactgtgcacacagctttcaagtataaatcttaaagagattattttaaaactgtagataagatttcaggcccttagtcaagcgtggtgcataccttctctgagtagggccatctctgggtcctggtgagtagtgtctatgtctgtgggaaggaagggctgctcggggccttcatctggctgagctcgattcatctgttcatagcatgggacaaaataccaacagaaatgtccattctatttacatgccaacacctaacaaagtctcttatttttaaaactcctttatatggctttgccatagaatcttgtatatacttttttttttttttcaaaatagaaatgattttttttctcattaaatttgtcatcttattacttgaaacgtgggcctttgttattggcagtggcttgctcccgaggaggcctgttctgtccaccctgtcccagaacgcactcatttgagtcagatgccacagttcttcctcacactggtctttggtttataccatgcagcaccatacctagagtcacagctgtctctaattgtcccctgaatatggaatgagagactcaggctgtgccctcattcactgctgctctgcactggagcctgtccccaatcagagaacttgcctcgtggccagcagtcttccttcctgggtcctgagcagcttcaagccttctgcattagtgctttctcttagccgtggctgttgggaagaagacccactgttctccacaggttgggttgttttttttttttttcctggctgtccttgtcccagcacagtgccatcagccattgtgagcagtgcttaaagtggaaagctacaccagcctaagaggctttgtgtaagctgacgtttaggatttaaagagcctggaccatctgagttctgactctgaagctctgcttggttgtaaagttccagttgattctgagcagtgaggtgtgaggccactgtcaccggtagggtctgcttggatgccgcctgctttacttggatctgttttgttggggactgctgcaaggagaattgcatgggaattttcttctttttctttacagagacttataagcatcgagttattctttgtagtcactcattaggcatagttttttttttttaagacccatgatgctgttgctattccccccccccttttttttttggttttttgagacagggtttctctgtataactctggctgtcctggaactcactttgtagacctcaaactcagaaatccccctgcctttgcctcctgagtgctgggattaaaggcatgcgccaccacggcccggctgctgttgatattttaaatgactattttaaaaagtcgttcagtgtggaaagttgaggagaggaagcctaggtaagttcctttaaagcatgcttggctcacctcggttagtcctgatcaatctcagtcggatgctaatgtaaatgtcgtgtggcaaaacaacttttaatgcagtctgactttccctctaacacgggcaaggaagaagacaccagcatttgcctctgcagcacagaggcagcccccaggatacccacgtagctcattgcttggtttgctcgcccattttacttttgccttattaaaaataaaatggtgaagatccattcaagtgaatataatagaattatctcaaaagccatttatcttaatagtcttacaaataaagtcatttcttagaagctattccattgatttcctcttattttgctacccctaaacactatttgaaaagaagtaatgagtttcaaaaaccacagcgtgtctgttaaatggcaaatttattattcttggtaaatgtgtatttaacaaacactaggaaaggatatctcgtgtgtatgtgagagagaaagagagagtgcttcacaacactttaaataatgccagccatattttcagataagaaacccagtggaggtgtgactcacgccttattttccagcctgtgcagatagagctgagatgcagactccaggctgtggtttcagtccctccaaggctcaggctcattgtgctactccactgtgtatttacttaaaccagatgtttaagcggggaaatagtagacaccccactagtggaggggtggaatcccttttacaatgcttcactgactatggcggaccagaacgtttctgtgccaaagccccacttcattcctttctgttctgttccacattctgccagagtcagaaccagccgtttggtcccaggtcctgcgacccattgctatctaaagagtatggttccctaatgagaacactgcagagaatcactgttgggaaatcaaacaagactttgtagaccaccacaggggcttggtagatctgcctgcctatggagaaagaagccagtagacaggaagaagcttcattctcatggttggggaggagcctaagtggtggagatctagtgtattgcctgtttatacagtgataaagtcaagtattttcatgggtagagagcgagggtggaggaagggaggggctgcgatcggtgcaaaaatggaaatacctttaatctcccaaaagctttgaccactggcaaacaattgaaatatcagcaaagactactgctcttaatggtcacaccctcttgtttaaatggcgtccccctcccaagcattaaattgcgctgaactatcacagttttacttagttctagtagttataatcattagcattctccttcaggagaaaatctaaatgctggaaatctaattcagagataacaagccaactttatgtgcaaactttatatttaaactgtttctagcagtgttacagtgattgtccaaactggattagacttttgcgttgaaatcaaagtatgggtaagtctagcacatgtaataaaaccttgctgtttcttgtggctacatttttttttttaacttgtctgtctcttagcctaccatgtagaggtcatttcttgagttaagatgggatggcctaaaagattcagtgtgtagttactgaagaagtaagtcccggcgcctcagagcagtctgtctcacagccccgcttccatttggaaacctgccattctggaaggaagcacttggtgttcttggaatgttcatgttggaatgatttttgttgttgttgttgttgttgactttttagttcagtcttagttcttttgtgtttgtatctatctatgtacatctgtgtgtgtggtggccatggattgaatagatgacttcttattttatgttttaggccaagattgacagacacctaaatgttcatgacttgagactattctgcagctataaaatttgaacctttgatgtgcaaagcaagacctgaagcccactccggaaactaaagtgaggcttgctaaccctgtagattgcctcacaagttgtctgtttacaaagtaagctttccatccaggggatgaagaacgccaccagcagaagacttgcaaaccctttaatttgatgtattgttttttaacatgtgtatgaaatgtagaaagatgtaaaggaaataaattaggagcgactactttgtattgtactgccattcctaatgtatttttatactttttggcagcattaaatatttttattaaatagactatgttggtt

SEQ ID NO: 5 - DNA, 9860 bp, Homo sapiens
agtgcctcaccaccacctgcccgcgcgccgccccatataaaggcgccgccgtccttacccccaggactcggccccatggagacgccgccggccgccgctggcgcatggcggggtgaggcgcggcggggagggtgcgggcctcggcggggaagcggcagggagcgctccggcggggtccgagccgagccgaggggaggggacgggaggggacgggaggggtggagaggggaggggacggaagggtcggggtcctgttccccggcccgccgggcctcaggacccctccaactttgcccaagttgggagagccggggaagagcaccaggttcctgatcgggatcgcgggccgagcaagcgcgggtctcgggccgggacagcctcggcgtcaccagctcccggcagccaaccaaagttttccagcaacttttctccccacgggtcaccccagaaacttgccctccccggctccgggagtccggccatgggccttgcgctgcctgggcctgagctctgagtgccggacgggtgggcgaaagtggtggcctcagtggggaagccttgggccccgcaacgcacttccagccccaggattccatctgagagccccgtccctgccttctgggtcccctgggttggcgtgggggttcgaggctttacagctggggtagttccagtcttagttcagactaagttccgatcttcgagccaccagctaacagctggatgaccttgagcacgtttttaatgtctgtgcctcagtttctccctttatagaatgggaatgggaatgcctagctgggagagcttttgagaggacaacctgaactaataacacgatgcagtgtgtagtgccaccaatccctcatcctgctggatgtggttttgggagggaggttaggagagagcgctattcaccgtccctaaccctgttggttgttcagtaggagctgtggcgcggggccttccaggagtctgagctatgagtggcccctgtggagagaagcctgtcctggaagccagccccaccatgagtctgtgggaatttgaggacagccacagccgtcagggcaccccaaggccgggtcaagagctggccgctgaggaggcctcggccctggaactgcagatgaaggtggacttcttccggaagctgggctattcatccacggagatccacagcgtcctgcagaagctgggcgtccaggcagacaccaacacggtgctgggtgagctggtgaaacacgggacagccaccgagcgggagcgccagacctcaccggacccctgccctcagctccctctagtcccgcggggtggtggcacccctaaggctcccaacctggagcctccactcccagaagaggaaaaggagggcagcgacctgagaccagtggtcatcgatgggagcaacgtggccatgaggtaagtgtcacttctgtggccaggacacatgaggttcgcatctctcctgtggccaggacacatggaaggatgactgtctctgcagctctggtgggctggaagaagtgacttccttcttagggactggtctagagggagggaaagccttttatgaggctagggtcgcgctactggtaagtgacagaggcagggttccagcccaggtccctctgtccgcagagcttaccttatgctgtgggtccctccctgaggccagcactgtgtctccactcctctcctgtaatgtgaggcagggctgtaaaggggaccagcccgtgggcagctgctcactcacccctcggaacctgatctcaggtgggtgttgtgaggagggagtgtgcggatcccggagaggagcaagcgttcaggaaccatagtagtggtagtaggcagtggtagtagcagttgttgttgttatttcaggggctgggcttctgaggccttcttgtctcagacctgggctcccacgaaaacaggtccagtgactgtgtccaagagtgacctcaaggctgggtccagctttacatgggttgtgggcaggtggcctgatgctctggcctcaggcgagctgcaacttggatccctactgactcagctgaagcagcctgggctggaccagtctctggaggttccccggggccagagccaggactcagcccccagtgactcccacccccatcccccagcacaggaatggggtggggaggtaggggcagagagggaagccagggctgctgctgaccttgggaaacccagacttctcccgtcaatccaggctccaccctctggccccacttttttcccagttccctccaaggcaggctgatgagtcagtgctgggtggatggctcacagggaaaagttcctgttggcatggacggggagaccccagacacagggttgagaagggatgattttctggctgccctgagggagctcctaggtgggctgcccaaggctggcatgacatcagcctctgccctccctaatttgtggcccctgtgggacaagttcactgtccagctggccctggcccagctcagcaggcatgcagctgagtgctcttccctccttctgtcaccttcaggccagtcttcctctctctgacttgggctgagcctggatgggaggctgagaaaatccagtttccatgccaagaggcagcaggtcacagcccatgcttcgagattagaaggggtccctctcagtgtccagcctcatgtagctgggctaggagctaggttggatctgtgtgactccttcctctggaggtatgggccaggagcggctgagccctgggagcagccatatgcagtatgtgtttgtatccagaaggaggagggacatgggaggaggggctgtgatgaggggtgctcagaggagcctgctcctgagaagcagagccacgcacccacctcgggggtttctgagctggggtagtggcaggaggggaattccagcctcaaacttcctgtctcagctgctactcggttcctgcccggccaccccccctccccaggggcaggcgggctagcccccccatcatatgcaaatcatggggaaattcacctctgtttccttctaagggaatttttttccactcgccaggcccagcccaggcatatcttttcacctggggaggctggcccagccctgccttctgtcctggggcaggagcagcctagctggagtcttctacacacacatcctatcagtgtctgcttagcccggctgggggaccctgaccttacaggcaaagagaactggaatgggggcagggatgtctggttttcctgtgccagcagcgcttcctccagtgcagtgaaagagactaaagctagctgtaggggggcactccaggcctcatgtgctctaccaggaggagggctctgatagcgcccactgatcagtttttccatctgctgagggaatattcaggtgctagggctgctgagaaccgacttgtcccagccaagattttcagtgcccacaggcagtgcactgccctgagagccctggcatcccattagttcccagtgctccaagatactagcctaggatcatgtgcccggagggaggcaggtgggcggatacatgcgcacactgcatacctgagacaaggagccaggcctgggatgacccagctgccatggttttgagaggcaggccagaaggcccaaggaaggggggtgatgtgatgggggaagcactgggcattgtgaagacacagaccagggacctgacctattgtggcaggtcagggaaggcttctcagaggcagtgacatctcacaagggttctgaaggaagagcaggagtttgccagcagcattgtttctcccgttcgccacctgtctctcataacacactttgttcaaactcaattttgggagctttgttctcccaaataaattctggatcttctgttagagacaggaaggcaaccgagtggcccagacctgggttcgagttctgactgtctcttaccactagccaggtgaccttcctttccttcacggtagcaagccctataagaatgaagccatatatctggccaccagcgggagctcagtgcctgcgaatccctgctcattccctgcgatcagggtctgtgcctgccttcgtacctgcctgagcattgacgtacagggtagtgataagcataggccctgggcttgcgtctctcttccaccgttaactgctgtgtgaccctggtgactaagctgccttctctggaccacagttttcatctgaaaaacagggaaggagttgatgatggtatagtgccctcctcacaagcttgctgatgattcagtgttagacacttataacagggcctggttcacagctctcagcaaatgggaacttttattataagcaggctggcagatgtggcagagggaccgggaaggatgagtgctgccctgggctggactttgtctcccctacaatttagagaccttcagaccctggtgccccagtcttgcccccaaatagcctccatggcccccagctgccccacctccctccctagcttctcttagggctccagctatcaccccttacctcccccactcccattaaagacacccacaggatgtggttggccctggacttgcctcttttgcgtaacatttattctgttttatttgccaaatacgagagtctaagctgttcactgagggggcagtgagacgtggggctgctggtcctaggagctcttccatgacacctagtgttacctgggagccccaagccccagtcccccatccctcaggaaatccagttggaacccctactttgcagggccatctttggcctgaagccaccaggaaagctgtcccactgactgacccctcttaaggaagctgcagactgctgggcccattttcagatagaggaacggagagctgcggcagcccaggagccctgccaggcttccttctgggtgcagccacctgtgggtggggcgcggcctcgtctgagaccaaggcagggcccatgccttactcagctgtccttgctaagagtcccctagcatcttcctgatggtctttctgccttggggtgaagaggcatttgggggaattgccatcttgggaggaaaagcagtatcctttcactttcagactgaaaggctcctggggaacttgcttcactccggcgctttctgtcccatgctgaaggctggagtcgccagccccttcccctttgcctttctcaggccccagtccctgaggtgtgtgtgaggactgaactttaatccggaacaatctggtttctcctcggtcagcccagccggtgcttcccccgcccccacccacgctgcaagaggcgagggaggggtggtgactcagtgtgcatgtgtacatctgtccctgtggtcccggcagctcgccgggtggggcaggaaccagaagtctcgcggcacctttcccccacccccaggtgtgttgcaagtggcctggccctcccccaccgtggggagcagtgctgccagcttcctgggcgcttcctcactttcaggagatggagcctcagggaaagtcccagcggggcctggccatcctggagctgtgggaactggcactgggaatggaggccttggccttgggccccacctgcagagggccagggcctgagccctggggaaaggggaaggggctggtgactccaaaggggaagggactgctcactaccaccaccaaagccagggcaggggtggggtgtgaccacctccctcctcctgctcaggcctagggggtggcaggctggccatcagtgtgggctaaccctgtcctctccctcccagccatgggaacaaggaggtcttctcctgccggggcatcctgctggcagtgaactggtttctggagcggggccacacagacatcacagtgtttgtgccatcctggaggaaggagcagcctcggcccgacgtgcccatcacaggtgagtggtgcctctggaggtgggatggtcttactgccccagcagccctggttctccccaagagagaccctctgggagtgacctacaacttctagaactcaagcagggaccagcatttcttttctcagttttttctgtccttagcaacctgctctgaatggtggtcattggaggtcaccttgtccagtcttctgcctcagatctggagcccctccctcatcctactggtgggcaggtcgctctttcaacatccccagtggcagaagcgcagtatcacatagtggttaagcctgtgggctctgagtcgagacagccagagttggaatcctggctctgtcccctcttggcgccctggcctggacagggacccctcttagccctgctctgagccacatgctcctcatctgaaacatggggtcggtgtcagcagggggtgttgacagcattgccttcctcgtgaggtcatataagttaacacacggtaagtgctgagaagagtacctggcacatggtagatgctcagtgtatgttagctgttaccactgttcttgcaagagcccccagcctttggaggtaaaaactgaatcagtttctctagaagtcttgagatctgggggcagcctgtctgggactgtaggctccaggaagaggggccctttccacttgcacacttctgtgtccctgtggtcccagcagctccccaggtggggcatggtgagtggcctgaccttttcccaccatgggatttagcgaccttgtcctggcaatgcaagggacagagccaagatacttctcccaccccagagcaagctgcggctcattcacggacccctcagaacaggctggatgaaagccaaagccaagaccacatctggcttgaacaggcctgatgtccagaaggagaaaaggaacaaggccagctctgtgcttggagcctctgccatgcaggccctgccgcctgtgttcagatgttcttggtcttcaggcagcaaactgtgccacgccaagggaggggctggggcatggaagaggcctcagcagagttagttcttgccccggtgaccttggcgttaaccactcctgtgtgtggccatcagcaggttagggagccctgtaggcctggctctaggtcccgctgggccctgacctgtgtgcacccgtcacctcccagaccagcacatcctgcgggaactggagaagaagaagatcctggtgttcacaccatcacgacgcgtgggtggcaagcgggtggtgtgctatgacgacagattcattgtgaagctggcctacgagtctgacgggatcgtggtttccaacgacacataccgtgacctccaaggcgagcggcaggagtggaagcgcttcatcgaggagcggctgctcatgtactccttcgtcaatgacaagtatgttccctcccagaggccctgacagacttggggtccacaggggaagccagaggtgcccttggcaagggtggagctgggggctgggctctgcggggccctgtggccatgggaggttgcgggtcttggctccaggcagctttgagagtgagacggatagctcaccacataggagaaatcagaccgggaccaggcaggctgtggggtggagagagtggctaatttgggagatagagccgtagcacttatgaggggatgtatgtggttgatggttccaggtggcctctctacgaaccaacatggcatctctcgagcagaggccatgggccagtgggtgcgggctgccatcccccgacgacctcagagagggagttcccctaaaggtgcccatgggctgtggccctctagaccggggatccctttctcctcccttggtatgatcccacccatagagcagttttgcggggtcctggacaggccccagttttaggtgtcactctcctattcttcccagcaaggcttgccatcggccccttctcagcaattagaagtccctgcatggctcccacctccagagagttctttgcaccctctgcaggtttatgccccctgatgacccactgggccggcacgggcccagcctggacaacttcctgcgtaagaagccactcactttggagcacaggaagcagccgtgtccctatggtatggaacccagcctgccctccccggccctcctcactcctgcccttcctctcacctgtctgcctgtgccctgttttcctcttggggacctccaccattggaccacccaaccccgtttcctgtgccaccccttccctgctctcatccctggttctgaagtgcccctgcttagagtccctcttgattcctcttccaggaaggaaatgcacctatgggatcaagtgccgattcttccacccagagcggccaagctgcccccagcgctctgtggcagatgagctccgtgccaatgctctcctctcaccccccagagccccaagcaaggacaaaaatggccggcggccttcaccttcatcccagtccagctctctgctaacagagagtgagcagtgcagcctggatgggaagaagctgggggcccaggcatccccagggtcccgccaagagggtctaacacagacctatgccccatcaggcaggagcctcgcacctagcgggggcagtggcagcagctttgggcccacagactggctcccacagacgctggactcactcccgtacgtctcccaggattgcctggactcgggcattggctccctggagagccagatgtcggaactttggggggttcgaggaggaggccctggtgagccgggcccaccccgagccccttacacgggctacagtccctatggatctgagctcccagccaccgcagccttctctgcctttggccgggccatgggtgctggccacttcagtgtccctgccgactacccacccgcgccccctgcctttccacctcgagagtactggtctgaaccatacccactgcccccacccacatcagtccttcaggagcccccagtgcagagcccaggggctggcaggagcccgtggggcagggcaggcagcctggccaaggagcaggccagcgtgtatactaagctgtgtggtgtgtttcccccgcacctggtggaggctgtgatggggcgcttcccacagctcctggacccccagcagctggctgccgagatcctctcctacaagtcccagcaccccagtgagtaagctgcctgtggctggcaagggcagcacccccagcctccaagggccgtcaggctgggctttgggccattgagcagcccattcccagccctgaggcccaccccagaggctggacagagggaggattcaagtcgggaaggaaacccacaaaccaaagatactgtaggattggttctggcccatgcagcacctctagctgtctgcctcagtgggtcagaagcgatcaccctgttgatacacattgtatctctgtagtttaaggagacgctgccggtaacggcgtcggtccgtggctgaggcccaaaccgtcttttctctcagagggtggggagggaggtgggggcagcagaggcctgggctgggtgccctgtgcacgccaccccacttccgccctacccctgggacgttggccttggctggctagttgggcaccgtgtgcctgccctccaagggcctcctctacgccaatgaggcctcatctgtgctctcgctgggcacgtggcttcatgtcagtaagcaagatgcttcttaataacccaccttctgccccactctattccttatcctgctgcccctgtaggggtcaagggccctccgtctacaccctcttcttctcctccatcctttattcagagtcatctcgcccttccccatgggtgggggaacctgtgtttgtttgtgtgcacatgtaaattttaaatattttaagcagaaagtccttacctcctgtaacacatcaataaagtacaatcattgtgagccctttcaa

SEQ ID NO: 6 - DNA, 9468 bp, Mus musculus
ttccgcgtcattgcccttaaagcacctgcccgcctgtcgcggctacgaaggtgccgtcagagcccgagactcggctccatggacaccttacagacgacgtccggcgctcagcggggtgagtgctaccgggtggaacgggtgctgcgctgcgttgggtctgactccgggagggtcgcgcgcgggcagtgtctccatcgctgggaccccgctgagttcaccctggtgcgtggaacggggtgtcttggggcacccggcgttctccgggctctagccaggacctcctcgcgtcaccgggcccggtagccaaccagagtcgcccagcaacttttctctccgtgggtcaccccggaaacttgtccttcccagaatagaactctgtccctgagccgaagtatgagactcggagacgaaggcggtggccacaatggggaagcccctgggtcccctgcgcacttccagccccagtttccttctgagagccccgcccctgcctcttgggtcccttgggttggcatggaacagaacggggtttgggggtggagtcagaccaagttcaaatgtttgtatcacaaactttgagttgatgatcttgagtaaacgcttactgcctgtgcctcggtctccctcttgtaaaaataactaatgctgagagctctttgagagcacagcgtgggctgacacgtgagaatggctttgaatagcgtcttctcagttcgtgttgccccattctgtggaagagagtctgaaagagacctatattgggcattgcttgcccttaaccctgtggtctggtcaataggagctgtgatggacacattccaagaatgtgaaatatgagtgacccttgtggaacgaagcctgtccaagaatccaaccccaccatgagtctgtggagtcttgaggacagacacagcagccagggtcgacctcagccagaccaggatcctgtggctaaagaggcccctacttccgagctgcagatgaaggtggactttttccgtaaactggggtactcgtcctctgagatccacagtgtcctgcagaagctgggagtccaagcagacaccaacacggtgctaggggaattggtgaagcatggctcagctactgaacgagaatgccaggccctgacggcccccagcccccagccccctctggtgccccggggtggaagcacccccaagccttccactctagaaccctcactcccagaggaggacagagagggcagcgacctgagacctgtggtcatcgacggaagcaatgtggccatgaggtatgtgtggagacctgtggaatagtgtctgtagctcttcctttgggaagggggcttggcttttctcttggactggtgaaggaacacaaaagctgtctgtgagatcccaccatgtgccagaaggaaccccttaagccttaaagacttcctcagggctgtttctccaatgctataagaaggaaaacagctcaaatccttgccaagagtcacacttcttgataaatgagaagcaaagattcaaacccagccttctttgcctggagtgtaccttgtgccatggtctatccttgcctacggcatgaggcaggacagtataagggattaacccgtgggccagtcacttagccagttgggctttttcttctcctgtcaaactttccactcaggtggcccctgtggggagaaaattcatagaacgtggagagttacaagtactcagtggagccgggcgtggtggcacacacctttaatcccagcacttgggaggcagaacaggcagatttctgagttcaaggccagcctggtctacagagtgagttccaggatagccaggttctatacagagaaaccctgtctcaaaaaagaagaagtactcagtggacagatgttattccatgacttgagtcttctgggatctccttgtccccgactcgagctcccactgaagcaaggctcattagttattcagagcttcctagccctaaccagctgtgaccttttggtcagatctggcatcttcagatgcgtgtgtacgggtagcctgatgctctgggctcaggtgtgctgtaatgagaatctatactccctgaagccgctcaggctggcctgacctctgggggttcccagatctcctgccgcctttgcatatctctcaaggaatggggtggggtggaggcagaatgggagccaggctgcctctgaccttaaggagccctgatttctcccttctatccaggccgcaccctccagctctgctttctcccagctccctgcacagcgggctggtgagtcaggactgggtggataaagtacaaggaaaagatcctgttggcagggaccaggggagaccccagcaaaagaacaggaagaggagaagtctcctttctagatcccctgagggctctcccaagaggactgcccaacttgttatgatgtcagcttcttcgccacctggctcctggtcctacctactcccagcccagctgggtcaagtgagctgtccagctggtcctggccctacttagctggttcatggaggcagcccttctctaccacctttgggtctgttgtcacatctttaaaatgggccgatcctgggctggaaggctgagaaatgctggcttctctgccagagggcagaagggtcaactggttaccttccgagtctcgagttctctctgaggtcctgaattaggaggggggtctgacttcccctgagagtcctaggctgggtgttaggagtcttgtgggcagccatgtgctctgggtatttgtttctgggcaggaggaggaggggcctgggtgggaggaggggcagtagtggaggggttcaagagagctgataccaaagagacagacagccactgtctgccctcttgcctgcctgcctatctgctgggggtttctgagctagggtggccacggaaggggaattccagcctcacacttcctgtctcagcagctgcttggttcctaccctgctgctacacacacacacacacacacacacacacacagacacacacaagggcaggccggctaacccccaccatatgcaaatcgtggggaaattcacctctgtttccttctaagggaattttcctccacaggagttaggcccagcccaggttgttctctccacctggggaggctagccctgccttgtccttgggcaggaatgggagctttccagagtcacggccctgtcagggtggggggccctgaactgtggaccagcaggactctgtgggtgggaggaagttggttttcctaggccaaccaggcttcctgcattgcagtgagctgaatgagctgtccaggcggtctgggcctcaggcctcaagggctctccctgccaagaatagggctctgactacctgctgagggaactgtcccagtgccagcactgctgagggcagacgtgtccccaacctgggttttaaatgcccacaggcggtatacagcctaagcaccctggcgtcttgagatcctccaacttgtctttgctggtccagggagggctcgtgagtccacatgtggacactgcacgctcaggacagcgagccatggggcagatgcttacctcacacctgagcgaggcagtgtgatgggacagcagtgggcattgtgaagccccagactgggccctgccctggcaggtgcggaggtggggtggggtggagtggggaggggttctcggaggttttgacatatcacttggcttccagaaagaagagaagaattggcagcaaatggctcatcatttctctgtctgtggggcggggaggcatctccctctccatatgcagaacacacaccatcattgataattgagttcagaaactgctcttctcccacatgaactttgggtcttctgtaagggacagccagcgctccaaccagtagccccactccctggttcagttttcaccacttggcagtagccagggaacttgtccaagtgacggaagtcttcctttctagacagagtgatggtcaaggtggactccgtgcctttcccacctatcagggctgttggtacctaagcaacaacagggtagttctgatcactggctactgtgtgaccctagtgactactaagttaccctctctggaccacaggagcggaggcagtgtacttctggttttgcttgctgatgattccgtgtagagcgcggaatggccaggtttgcagctccctgtgaatgttaaccgacttatgagcaagccgcctgggaccaggagggcgcgagggctcccttggggtgggctttcttcctctccaactcagagacctctagctagaccttggagccttgccctgagatagtgtccattcccactctgttctcttggggctcaagctatcgctcccccaaagccacccacaggatgtggtctgccatggacttgcctcttttgcgtaacatgtattctgttttatttgccaaatatgagtctgagtcgctcactctccccagagtaacaagaggcagggctttctggggagggagccccaagctccagtcctccttcagcactcccagaaaatccaccttgccagcgcctctggcctcaagccttagggagctctgtgtccctggggtgaaagagcttgtctgcaaaagctgtccaccaagcttgtgggcagagacacagaccagggcaagcagctaggctgcttccgaggaaagccgtgtttagatagaacaaggccagggcctgatgccccagccctcctgtgagcagagttccccagtaatttcctgcccatcatctgccaggggtcacgccctccctggggcggggggtaggggagggcagggaggggcagggcagtctttgcagggaacaggcctcttaagaggaaaagaggtggcctttcactttcacacggaaaagctcctggtgctgttatttcctgaccccttgtggaaggacgctccccgtgcccctgagacctcatgcagactgaactttaatcctcaacagtctggtttctcctgcttaacatggccggtgcctccctcccccgcctcccttgctggtgcctccttgctgtgtagtgttgagggaaagaggtgactcagcctgcatgtgcacatccacgtccccgtggtccctgcagcttgggtggggcaggatccccaagtctcccatcacttttccccacccccaggtatgttgcaaatggcccgaccctccccctctacgtggggagccagtgtggctagattcctgggtggatccacgcttttaggagatggaatcttagggaaagtcccttccaggggctggccatcaggcactgtgggaaccggcccagggacaagaccttaggccctactggcagagggccatgggctgagtcctacagttgcccagcaaggccaagcagggctagattgtggctcccttcttacttttgctctgaccggactgactacatacagactggctactctgtgagctaacctttccctcctctgccagccatgggaacaaggaagtcttctcttgccggggcattctgctggctgtgaactggtttctggagcgaggccacacagatattaccgtgtttgtgccatcttggaggaaggaacagcctcgaccagatgtgcctatcacaggtatgtatgccctctggaagtaggatagcctcactctactagggaccctggtgcttccccaaagggtccttaaatagggtcagcaccttctaaactgtaatgaggaccagcctgtctttttcaattcttgttgctttcagcagcccagttcaggcaggaaatggctggaagtcaccttgtgtcgctttgggatgccttcctgatcctattggagtggggtgtcccttcttcaacatccccggtggcagagggacagtgtagcttcatatttgaaattgtgggtgctgggccaagaagacagggtaaagggcttggccctaagttactcaggtaagggcttcaagtagacattagctgtgggctcttccatctgtgaaatgggacagggtagaggtggcatcctccaaacactgctgaaggagcagttgagaatggtacagaagtgcttaactcagtgcagtgtgaaagctcggcatagtgtgaatgcccagctgcgaccattgctctcatgaaagcccccaccttgaggaggagggagtgacaagaggcagctttttaagaagtctgcataggctggagagatggctcagtggttaagaacactgactgcccttccagaggtcctgagttcaaatcccaggaactacacggtggctgacaaccatctgtaatgggatctgatgccctcttctggtgtgtctgagctacagagtactctaaataaattattaagaaaaaaaaataaggttggcttagataaaaaccatagactacattttaaaaaaaaaataaagaagtctgcaaatcagggccatgctaggggcttctaggccttttctgaacagagctgggagtgttgttttgagtgtgtagaggacagggccaagacacttcttcctggacccctgtggtacaggcaaggcacacaggtcggaggggaagtaggaagagccactcttggctccgcactcttgctgaatgtgatggccctgcatagagatgcacttggttttcacacagctggtttccgtcctcttggaactggtgtgaacagcctctcatcccggccactgtgagccatgggaccctgtgggtccatcttagggtctccaatgggccctgacctgcagctctgctcatcccccagaccagcacatccttcgggaactagagaaaaagaagatcttggtgttcacgccatccaggcgggtcggcggcaagcgcgtggtgtgctatgatgaccgcttcattgtgaagctggccttcgaatccgacggagtggtggtctccaatgacacgtaccgagacctccaaggcgagaggcaggagtggaaacgcttcatcgaggagcggctgctcatgtactccttcgtcaatgacaagtacgttactgctggggactggctctgctgggcccacaggctgggctgcagctttcggggtgacatgagttgcagggagaaggctagggacagtggaactttttgatagggagcctgggagttgaagctggcccgagacagaaccaattcgttcctaggtggctctctcaagaaggtctatggccacacacatcccaagatacacttagccttcctgatagcctcatagttcccagcctagggagtgccccgaaggcgaccctggcctataccctctggactgagggatcccctcctcctctggggtgacccaactgcaaactcagaagactttaggggcatcctgcagacaagcatcttgggagctggctatctaaccctttccttggttcctcttcacgacttctgtttcctgagcgttctgcttcacctaccacaggttcatgccccctgacgaccctttaggacggcatgggcctagcctggacaacttccttcgtaagaaaccactgccttctgagcacaggaagcagccatgcccctatggtgagacccagctctgtcctcaatagtcttacttaccctacctttcctcttgcctgtcccatcccacttaggcccgcccgtggcttccttgtggggaccccctgttctagaccacctgaatcccaagtctgtgcctcgtcctcgctctgaccccatttagacaccctctctgttcttgcagggaagaaatgtacgtatggaatcaagtgccgatttttccaccctgagcggccaagccgtccccagcgctctgtggccgatgagctccgtgccaacgctctcctctcacctcccaggactccagtcaaggacaaaagtagccagaggccttcccctgcctctcagtccagctctgtgtccctagaggctgaaccaggcagcctggatgggaaaaagctgggtgccaggtcatctccgggtccccaccgagaaggctcaccgcagacctgtgctccagctggcaggagcctccctgttagtgggggcagctttgggcccacagagtggcttgcacacacccaggactcactcccatacacctcccaggagtgccttgattcaggcattggttccctggagagccagatgtcagaattatggggcgtgcgaggaggcagccctggggagtcgggccccactcggggcccctatgcaggttatcacagctatggatccaaggtcccagcagcaccttccttttctccttttagaccagccatgggtgctggccacttcagtgtccccaccgactatgtgcccccgccacccacctacccatccagagagtactggtctgagccgtacccattacccccacccactcctgtccttcaggagccccagagacccagccccggggctggtgggggcccctggggcagggtgggtgacctggccaaagaaagggctggtgtatataccaagctgtgtggtgtcttccccccacacctggtagaagctgtaatgagacgcttcccacagctgctggatccgcagcagctggccgcagagatcctgtcttacaagtcccagcacctcagtgagtaagccagaaggtggcgcaaggggctgtcgggcatcacagatagcggtccccagcccctgcctggcctaccctggaagctggacagaaggacaagtgaagcaggcaagggaatcctcaaaccaaagataccataggattggttctggccccgcggcaccccaacccgtcccgcacaggtcagaagtgatcaccctgttgatacacattgtatctctgtcatttaaggagacgctgccggtcaggccgtccatccgtggctgatgcccaaaccctcttttttttttctcagagggccgggtgggaggcatgggggagcagaggcctgagctggaccccaccttccaccctgtccctgggacgccggcaccaccggctagttaggcaccatgtgcctgctctctgaggccccctcaagccaatgcggcctcatccctgttcacagggcatgaggcttcatgttagtaagcaagatgcttctttaagcccctcccctgcccgctctgtccacctacacaccccccccccaaccagggctccaaggccctctgtttccacacctcccatgggtgggaggacacatgtatgctgtgtacagaggcgagatttaaatattttaaatgaaaaaggttgacaaaataaaggctattgccaggcaggctggagagatggctcagtggttaagagcaccgactgctcttctgaaggtcctgagttcaaatgtcagcaaccacatggtggctcacaaacatctgtgatgagatctggtgccctcttctggggtgtctgaagacagctacagtgtacttacatacaataataaatcttttaaaaaagagagaaatttaaaagaaaaaaaaagctattgcc

SEQ ID NO: 7 - DNA, 20 bp, Mus musculus
gaagtgcacgcggatgctcg

SEQ ID NO: 8 - DNA, 20 bp, Mus musculus
agtgctccagcagctcgaaa

SEQ ID NO: 9 - DNA, 20 bp, Mus musculus
gccggccgcttccacttgga

SEQ ID NO: 10 - DNA, 20 bp, Mus musculus
gctgtgtcgccagcgcatcg

SEQ ID NO: 11 - DNA, 20 bp, Mus musculus
gcgactgtcgcgcaccaaga

SEQ ID NO: 12 - DNA, 20 bp, Mus musculus
gcgtgcacggggcgcacgag

SEQ ID NO: 13 - DNA, 20 bp, Mus musculus
tcacggagtaccgggttaag

SEQ ID NO: 14 - DNA, 20 bp, Mus musculus
ggacgcctgcggcttctatt

SEQ ID NO: 15 - DNA, 20 bp, Mus musculus
gcgcgaagaagcagttccgt

SEQ ID NO: 16 - DNA, 20 bp, Mus musculus
gctcagcgtgaagatggctt

SEQ ID NO: 17 - DNA, 20 bp, Mus musculus
cgagcccgtgggcaccttct

SEQ ID NO: 18 - DNA, 20 bp, Mus musculus
atccgcgtgcacttccaggc

SEQ ID NO: 19 - DNA, 20 bp, Mus musculus
cgccaggttctcgcgaccca

SEQ ID NO: 20 - DNA, 20 bp, Homo sapiens
gcggctgcgcgccgagcccg

SEQ ID NO: 21 - DNA, 20 bp, Homo sapiens
ggacgcctgcggattctact

SEQ ID NO: 22 - DNA, 20 bp, Homo sapiens
ggctgccatccaggtgaaag

SEQ ID NO: 23 - DNA, 20 bp, Homo sapiens
gcggctgtcgcgcaccagga

SEQ ID NO: 24 - DNA, 20 bp, Homo sapiens
tggacgcctgcggattctac

SEQ ID NO: 25 - DNA, 20 bp, Homo sapiens
gacgcctgcggattctactg

SEQ ID NO: 26 - DNA, 20 bp, Homo sapiens
agtgctccagcagctcgaag

SEQ ID NO: 27 - DNA, 20 bp, Homo sapiens
gccggccgctttcacctgga

SEQ ID NO: 28 - DNA, 20 bp, Homo sapiens
agtagaatccgcaggcgtcc

SEQ ID NO: 29 - DNA, 20 bp, Homo sapiens
cgcaccaggaaggtgcccac

SEQ ID NO: 30 - DNA, 20 bp, Homo sapiens
ggccggcctgaaagtgcacg

SEQ ID NO: 31 - DNA, 20 bp, Homo sapiens
tccgttcgcacgccgattac

SEQ ID NO: 32 - DNA, 20 bp, Homo sapiens
agcgcgctcctggacgcctg

SEQ ID NO: 33 - DNA, 20 bp, Homo sapiens
cggctgcgcgccgagcccgt

SEQ ID NO: 34 - DNA, 20 bp, Homo sapiens
acgcctgcggattctactgg

SEQ ID NO: 35 - DNA, 20 bp, Homo sapiens
cgaggccatcttcacgctaa

SEQ ID NO: 36 - DNA, 20 bp, Homo sapiens
tcaggccggccgctttcacc

SEQ ID NO: 37 - DNA, 20 bp, Homo sapiens
cttagcgtgaagatggcctc

SEQ ID NO: 38 - DNA, 20 bp, Homo sapiens
gccggtaatcggcgtgcgaa

SEQ ID NO: 39 - DNA, 20 bp, Homo sapiens
ctgcattgtcggctgccacc

SEQ ID NO: 40 - DNA, 20 bp, Homo sapiens
gtgcgccccgtgcacgctca

SEQ ID NO: 41 - DNA, 20 bp, Homo sapiens
gctgtgccgccagcgcatcg

SEQ ID NO: 42 - DNA, 20 bp, Homo sapiens
cacgcggcgctggcgcagcg

SEQ ID NO: 43 - DNA, 20 bp, Homo sapiens
gctcctgcagcggccgcacg

SEQ ID NO: 44 - DNA, 20 bp, Homo sapiens
agctctcgcggctgccatcc

SEQ ID NO: 45 - DNA, 20 bp, Homo sapiens
tggtgcgcgacagccgccag

SEQ ID NO: 46 - DNA, 20 bp, Homo sapiens
gatggtagcacacaaccagg

SEQ ID NO: 47 - DNA, 20 bp, Homo sapiens
agaggcagtcgaagctctcg

SEQ ID NO: 48 - DNA, 20 bp, Homo sapiens
gctggcggctgtcgcgcacc

SEQ ID NO: 49 - DNA, 20 bp, Homo sapiens
ccgaggccatcttcacgcta

SEQ ID NO: 50 - DNA, 20 bp, Homo sapiens
ggggcccccagcatgcggcg

SEQ ID NO: 51 - DNA, 20 bp, Homo sapiens
gctgctggagcactacgtgg

SEQ ID NO: 52 - DNA, 20 bp, Homo sapiens
cgagctgctggagcactacg

SEQ ID NO: 53 - DNA, 20 bp, Homo sapiens
cgaaaaagcagttccgctgg

SEQ ID NO: 54 - DNA, 20 bp, Homo sapiens
gcaggcgtccaggagcgcgc

SEQ ID NO: 55 - DNA, 20 bp, Homo sapiens
ggggcccctgagcgtgcacg

SEQ ID NO: 56 - DNA, 20 bp, Homo sapiens
gcggcgccgcgccgcatgct

SEQ ID NO: 57 - DNA, 20 bp, Homo sapiens
gcacgcggcgctggcgcagc

SEQ ID NO: 58 - DNA, 20 bp, Homo sapiens
tgggggcccctgagcgtgca

SEQ ID NO: 59 - DNA, 20 bp, Homo sapiens
caggaaggtgcccacgggct

SEQ ID NO: 60 - DNA, 20 bp, Homo sapiens
tgcgccccgtgcacgctcag

SEQ ID NO: 61 - DNA, 20 bp, Homo sapiens
gccatccaggtgaaagcggc

SEQ ID NO: 62 - DNA, 20 bp, Homo sapiens
cacgcgcgccagcgcgctcc

SEQ ID NO: 63 - DNA, 20 bp, Homo sapiens
gggcccccagtagaatccgc

SEQ ID NO: 64 - DNA, 20 bp, Homo sapiens
atccgcgtgcactttcaggc

SEQ ID NO: 65 - DNA, 20 bp, Homo sapiens
cgagcccgtgggcaccttcc

SEQ ID NO: 66 - DNA, 20 bp, Homo sapiens
ccacagcagcagagccccga

SEQ ID NO: 67 - DNA, 20 bp, Homo sapiens
agccaggttctcgcggccca

SEQ ID NO: 68 - DNA, 20 bp, Homo sapiens
aaagtgcacgcggatgctcg

SEQ ID NO: 69 - DNA, 20 bp, Homo sapiens
ctcttcctcctcctcgcccg

SEQ ID NO: 70 - DNA, 20 bp, Homo sapiens
gcgtgcacggggcgcacgag

SEQ ID NO: 71 - DNA, 20 bp, Homo sapiens
aagtgcacgcggatgctcgt

SEQ ID NO: 72 - DNA, 20 bp, Homo sapiens
cgtgcgccccgtgcacgctc

SEQ ID NO: 73 - DNA, 20 bp, Homo sapiens
gcagcggccgcacgcggcgc

SEQ ID NO: 74 - DNA, 20 bp, Homo sapiens
ccttagcgtgaagatggcct

SEQ ID NO: 75 - DNA, 20 bp, Homo sapiens
caggttctcgcggcccacgg

SEQ ID NO: 76 - DNA, 20 bp, Homo sapiens
gcgcaccaggaaggtgccca

SEQ ID NO: 77 - DNA, 20 bp, Homo sapiens
gctgccggtcaaatctggaa

SEQ ID NO: 78 - DNA, 20 bp, Homo sapiens
cggcgtgcgaacggaatgtg

SEQ ID NO: 79 - DNA, 20 bp, Homo sapiens
cagcagcagagccccgacgg

SEQ ID NO: 80 - DNA, 20 bp, Homo sapiens
gggcgaaaaagcagttccgc

SEQ ID NO: 81 - DNA, 20 bp, Homo sapiens
cgcacgcggcgctggcgcag

SEQ ID NO: 82 - DNA, 20 bp, Homo sapiens
ggatgcgagccaggttctcg

SEQ ID NO: 83 - DNA, 20 bp, Homo sapiens
tggcggcacagctcctgcag

SEQ ID NO: 84 - DNA, 20 bp, Homo sapiens
gcgcccgcggccgtgccccg

SEQ ID NO: 85 - DNA, 20 bp, Homo sapiens
ggcgccgcgccgcatgctgg

SEQ ID NO: 86 - DNA, 20 bp, Homo sapiens
cggtggccacgatgcgctgg

SEQ ID NO: 87 - DNA, 20 bp, Homo sapiens
tgctgtggagactgcattgt

SEQ ID NO: 88 - DNA, 20 bp, Homo sapiens
taggatggtagcacacaacc

SEQ ID NO: 89 - DNA, 20 bp, Homo sapiens
gcggccgtgccccgcggtcc

SEQ ID NO: 90 - DNA, 20 bp, Homo sapiens
gagcatccgcgtgcactttc

SEQ ID NO: 91 - DNA, 20 bp, Homo sapiens
cgctgccggtcaaatctgga

SEQ ID NO: 92 - DNA, 20 bp, Homo sapiens
cagcgcatcgtggccaccgt

SEQ ID NO: 93 - DNA, 20 bp, Homo sapiens
gcggatgctcgtgggtcccg

SEQ ID NO: 94 - DNA, 20 bp, Homo sapiens
cggcgccgcgccgcatgctg

SEQ ID NO: 95 - DNA, 20 bp, Homo sapiens
cggtcaaatctggaagggga

SEQ ID NO: 96 - DNA, 20 bp, Homo sapiens
aggaaggttctggccgccgt

SEQ ID NO: 97 - DNA, 20 bp, Homo sapiens
ccacggtggccacgatgcgc

SEQ ID NO: 98 - DNA, 20 bp, Homo sapiens
cgctgcgccagcgccgcgtg

SEQ ID NO: 99 - DNA, 20 bp, Homo sapiens
aggagctcaggtagtcgcgg

SEQ ID NO: 100 - DNA, 20 bp, Homo sapiens
gcagcggggcccccagcatg

SEQ ID NO: 101 - DNA, 20 bp, Homo sapiens
ggaaggagctcaggtagtcg

SEQ ID NO: 102 - DNA, 20 bp, Homo sapiens
tcgcggaggacggggttgag

SEQ ID NO: 103 - DNA, 20 bp, Homo sapiens
cgactgcctcttcgagctgc

SEQ ID NO: 104 - DNA, 20 bp, Homo sapiens
gcgccgcgtgcggccgctgc

SEQ ID NO: 105 - DNA, 20 bp, Homo sapiens
caccgtgggccgcgagaacc

SEQ ID NO: 106 - DNA, 20 bp, Homo sapiens
gtgccccgcggtcccggccc

SEQ ID NO: 107 - DNA, 20 bp, Homo sapiens
ctgccggtcaaatctggaag

SEQ ID NO: 108 - DNA, 20 bp, Homo sapiens
cttccccttccagatttgac

SEQ ID NO: 109 - DNA, 20 bp, Homo sapiens
ctcaggtagtcgcggaggac

SEQ ID NO: 110 - DNA, 20 bp, Homo sapiens
cgggcgctgccggtcaaatc

SEQ ID NO: 111 - DNA, 20 bp, Homo sapiens
ggaaggttctggccgccgtc

SEQ ID NO: 112 - DNA, 20 bp, Homo sapiens
gctcaggtagtcgcggagga

SEQ ID NO: 113 - DNA, 20 bp, Homo sapiens
gcggaagtgcgtgtcgccgg

SEQ ID NO: 114 - DNA, 20 bp, Homo sapiens
ggaccgcggggcacggccgc

SEQ ID NO: 115 - DNA, 20 bp, Homo sapiens
gggaccgcggggcacggccg

SEQ ID NO: 116 - DNA, 20 bp, Homo sapiens
gcgcgtgatgcgccggtaat

SEQ ID NO: 117 - DNA, 20 bp, Homo sapiens
tcaggtagtcgcggaggacg

SEQ ID NO: 118 - DNA, 20 bp, Homo sapiens
tgcggaagtgcgtgtcgccg

SEQ ID NO: 119 - DNA, 20 bp, Homo sapiens
ggggccgggaccgcggggca

SEQ ID NO: 120 - DNA, 20 bp, Homo sapiens
ccgtcggggctctgctgctg

SEQ ID NO: 121 - DNA, 20 bp, Homo sapiens
gaaggttctggccgccgtcg

SEQ ID NO: 122 - DNA, 20 bp, Homo sapiens
gtgtgctaccatcctacaga

SEQ ID NO: 123 - DNA, 20 bp, Homo sapiens
gtcgcggaggacggggttga

SEQ ID NO: 124 - DNA, 20 bp, Homo sapiens
cgctggcgcgcgtgatgcgc

SEQ ID NO: 125 - DNA, 20 bp, Homo sapiens
gcgtgcacggcgggcgctgc

SEQ ID NO: 126 - DNA, 20 bp, Homo sapiens
tctggaaggggaaggagctc

SEQ ID NO: 127 - DNA, 20 bp, Homo sapiens
gtgcgtgtcgccgggggccg

SEQ ID NO: 128 - DNA, 20 bp, Homo sapiens
gggcacggccgcgggcgcgc

SEQ ID NO: 129 - DNA, 20 bp, Homo sapiens
gttaatgctgcgtgcacggc

SEQ ID NO: 130 - DNA, 20 bp, Homo sapiens
gcacggccgcgggcgcgcgg

SEQ ID NO: 131 - DNA, 20 bp, Homo sapiens
ggggcacggccgcgggcgcg

SEQ ID NO: 132 - DNA, 20 bp, Homo sapiens
gtgcggaagtgcgtgtcgcc

SEQ ID NO: 133 - DNA, 20 bp, Homo sapiens
gaggaagaggaggaaggttc

SEQ ID NO: 134 - DNA, 20 bp, Homo sapiens
ggctggccccttctgtagga

SEQ ID NO: 135 - DNA, 20 bp, Homo sapiens
ggggccggggccgggaccgc

SEQ ID NO: 136 - DNA, 20 bp, Homo sapiens
cgcggaggacggggttgagg

SEQ ID NO: 137 - DNA, 20 bp, Homo sapiens
tttcgcccttagcgtgaaga

SEQ ID NO: 138 - DNA, 20 bp, Homo sapiens
ggcacggccgcgggcgcgcg

SEQ ID NO: 139 - DNA, 20 bp, Homo sapiens
agtcgcggaggacggggttg

SEQ ID NO: 140 - DNA, 20 bp, Homo sapiens
gggccggggccgggaccgcg

SEQ ID NO: 141 - DNA, 20 bp, Homo sapiens
aagtgcgtgtcgccgggggc

SEQ ID NO: 142 - DNA, 20 bp, Homo sapiens
ctccggctggccccttctgt

SEQ ID NO: 143 - DNA, 20 bp, Homo sapiens
ggcggcgccgcgccgcatgc

SEQ ID NO: 144 - DNA, 20 bp, Homo sapiens
agtgcgtgtcgccgggggcc

SEQ ID NO: 145 - DNA, 20 bp, Homo sapiens
tgtgcggaagtgcgtgtcgc

SEQ ID NO: 146 - DNA, 20 bp, Homo sapiens
gtgtcgccgggggccggggc

SEQ ID NO: 147 - DNA, 20 bp, Homo sapiens
tgtcgccgggggccggggcc

SEQ ID NO: 148 - DNA, 20 bp, Homo sapiens
gcggtcccggccccggcccc

SEQ ID NO: 149 - DNA, 20 bp, Homo sapiens
cgcgggggccgcgggcgagg

SEQ ID NO: 150 - DNA, 20 bp, Homo sapiens
cgcgggcgaggaggaggaag

SEQ ID NO: 151 - DNA, 20 bp, Homo sapiens
gggcgaggaggaggaagagg

SEQ ID NO: 152 - DNA, 21 bp, Mus musculus
tttcgagctgctggagcacta

SEQ ID NO: 153 - DNA, 21 bp, Mus musculus
tcgagctgctggagcactacg

SEQ ID NO: 154 - DNA, 21 bp, Mus musculus
tcgccaacggaactgcttctt

SEQ ID NO: 155 - DNA, 21 bp, Mus musculus
acttctggctggagacctcat

SEQ ID NO: 156 - DNA, 21 bp, Mus musculus
gcgagaccttcgactgccttt

SEQ ID NO: 157 - DNA, 21 bp, Mus musculus
cgacactcacttccgcacctt

SEQ ID NO: 158 - DNA, 21 bp, Mus musculus
ctacctgagttccttcccctt

SEQ ID NO: 159 - DNA, 21 bp, Mus musculus
ttccgctcccactccgattac

SEQ ID NO: 160 - DNA, 21 bp, Mus musculus
taacccggtactccgtgacta

SEQ ID NO: 161 - DNA, 21 bp, Mus musculus
tactccgtgactacctgagtt

SEQ ID NO: 162 - DNA, 21 bp, Mus musculus
cttccgctcccactccgatta

SEQ ID NO: 163 - DNA, 21 bp, Mus musculus
gcgcgacagtcgccaacggaa

SEQ ID NO: 164 - DNA, 21 bp, Mus musculus
tggacgcctgcggcttctatt

SEQ ID NO: 165 - DNA, 21 bp, Mus musculus
cgcatccctcttaacccggta

SEQ ID NO: 166 - DNA, 21 bp, Mus musculus
tacatattcccagtatctttg

SEQ ID NO: 167 - DNA, 21 bp, Mus musculus
gcgccttattatttcttatta

SEQ ID NO: 168 - DNA, 21 bp, Mus musculus
ccgtgactacctgagttcctt

SEQ ID NO: 169 - DNA, 21 bp, Mus musculus
ggagggtctctggcttcattt

SEQ ID NO: 170 - DNA, 21 bp, Mus musculus
ttcgcgctcagcgtgaagatg

SEQ ID NO: 171 - DNA, 21 bp, Mus musculus
atccctcttaacccggtactc

SEQ ID NO: 172 - DNA, 19 bp, Artificial Sequence
  SOCS1_shRNA_1
cacgcacttccgcacattc

SEQ ID NO: 173 - DNA, 19 bp, Artificial Sequence
  SOCS1_shRNA_2
ttccgttcgcacgccgatt

SEQ ID NO: 174 - DNA, 19 bp, Artificial Sequence
  SOCS1_shRNA_3
gagcttcgactgcctcttc

SEQ ID NO: 175 - RNA, 23 nt, Artificial Sequence
  SOCS1_siRNA_1
cgcacuuccgcacauuccguucg

SEQ ID NO: 176 - RNA, 23 nt, Artificial Sequence
  SOCS1_siRNA_2
ggggagggucucuggcuuuauuu

SEQ ID NO: 177 - RNA, 23 nt, Artificial Sequence
  SOCS1_siRNA_3
cagcauuaacugggaugccgugu

SEQ ID NO: 178 - RNA, 23 nt, Artificial Sequence
  SOCS1_siRNA_4
ccaggaccugaacucgcaccucc

SEQ ID NO: 179 - RNA, 23 nt, Artificial Sequence
  SOCS1_siRNA_5
uacauauacccaguaucuuugca

SEQ ID NO: 180 - RNA, 23 nt, Artificial Sequence
  SOCS1_siRNA_6
gccgacaaugcagucuccacagc

SEQ ID NO: 181 - RNA, 23 nt, Artificial Sequence
  SOCS1_siRNA_7
ccccugguuguuguagcagcuua

SEQ ID NO: 182 - RNA, 23 nt, Artificial Sequence
  SOCS1_siRNA_8
cugcugugcagaauccuauuuua

SEQ ID NO: 183 - RNA, 23 nt, Artificial Sequence
  SOCS1_siRNA_9
ugggaugccguguuauuuuguua

SEQ ID NO: 184 - RNA, 23 nt, Artificial Sequence
  SOCS1_siRNA_10
ucgcaccuccuaccucuucaugu

SEQ ID NO: 185 - DNA, 20 bp, Homo sapiens
ccatgcccaccaccatcgag

SEQ ID NO: 186 - DNA, 20 bp, Homo sapiens
tctacggaaacgtattcgag

SEQ ID NO: 187 - DNA, 20 bp, Homo sapiens
tttagtatattgagaacttg

SEQ ID NO: 188 - DNA, 20 bp, Homo sapiens
gcactacagtggatcaccgc

SEQ ID NO: 189 - DNA, 20 bp, Homo sapiens
tgtcatgctgaaccgcattg

SEQ ID NO: 190 - DNA, 20 bp, Homo sapiens
ggaaacttggccactctatg

SEQ ID NO: 191 - DNA, 20 bp, Homo sapiens
gtatttgaaattattaatgc

SEQ ID NO: 192 - DNA, 20 bp, Homo sapiens
cagtttagttgacatagaag

SEQ ID NO: 193 - DNA, 20 bp, Homo sapiens
gggtctgaataagacccatt

SEQ ID NO: 194 - DNA, 20 bp, Homo sapiens
ccatgactatcctcatagag

SEQ ID NO: 195 - DNA, 20 bp, Mus musculus
aatctggccaggtggtataa

SEQ ID NO: 196 - DNA, 20 bp, Mus musculus
aatatgagaaagtatcgaat

SEQ ID NO: 197 - DNA, 20 bp, Mus musculus
atcactgcaggtccatggtc

SEQ ID NO: 198 - DNA, 20 bp, Mus musculus
atgtgcacagtactggccaa

SEQ ID NO: 199 - DNA, 20 bp, Mus musculus
ggcagcatgtgttcggaagt

SEQ ID NO: 200 - DNA, 20 bp, Mus musculus
aagaagtttagaaatgaagc

SEQ ID NO: 201 - DNA, 20 bp, Mus musculus
gccacaccatgagccagaaa

SEQ ID NO: 202 - DNA, 20 bp, Mus musculus
cctttcttgcagatggaaaa

SEQ ID NO: 203 - DNA, 20 bp, Mus musculus
gtactttgctccttctatta

SEQ ID NO: 204 - DNA, 20 bp, Mus musculus
agaaatgaagctggtgactc

SEQ ID NO: 205 - DNA, 20 bp, Mus musculus
gtttagcatgacaactgctt

SEQ ID NO: 206 - DNA, 20 bp, Mus musculus
gcccgatgcccgcactgcaa

SEQ ID NO: 207 - DNA, 20 bp, Mus musculus
tgacagagaaatggtgttta

SEQ ID NO: 208 - DNA, 20 bp, Mus musculus
gctggctgtgaactggtttc

SEQ ID NO: 209 - DNA, 20 bp, Mus musculus
ctagttcccgaaggatgtgc

SEQ ID NO: 210 - DNA, 20 bp, Mus musculus
attggagaccaccactccgt

SEQ ID NO: 211 - DNA, 20 bp, Mus musculus
ttccctcctctgccagccat

SEQ ID NO: 212 - DNA, 20 bp, Mus musculus
cgaaggaagttgtccaggct

SEQ ID NO: 213 - DNA, 20 bp, Mus musculus
atacctgtgataggcacatc

SEQ ID NO: 214 - DNA, 20 bp, Mus musculus
gacttccttgttcccatggc

SEQ ID NO: 215 - DNA, 20 bp, Mus musculus
ggccttcgaatccgacggag

SEQ ID NO: 216 - DNA, 20 bp, Homo sapiens
aagctggcctacgagtctga

SEQ ID NO: 217 - DNA, 20 bp, Homo sapiens
gcgggactagagggagctga

SEQ ID NO: 218 - DNA, 20 bp, Homo sapiens
cagctccctctagtcccgcg

SEQ ID NO: 219 - DNA, 20 bp, Homo sapiens
caggacgctgtggatctccg

SEQ ID NO: 220 - DNA, 20 bp, Homo sapiens
aacatacttgtcattgacga

SEQ ID NO: 221 - DNA, 20 bp, Homo sapiens
ctcacctgtgatgggcacgt

SEQ ID NO: 222 - DNA, 20 bp, Homo sapiens
aacacgggacagccaccgag

SEQ ID NO: 223 - DNA, 20 bp, Homo sapiens
cgacagattcattgtgaagc

SEQ ID NO: 224 - DNA, 20 bp, Homo sapiens
acaccatcacgacgcgtggg

SEQ ID NO: 225 - DNA, 20 bp, Homo sapiens
tcccagccatgggaacaagg

SEQ ID NO: 226 - DNA, 20 bp, Homo sapiens
ggagtggaagcgcttcatcg

SEQ ID NO: 227 - DNA, 20 bp, Homo sapiens
ttaggggtgccaccaccccg

SEQ ID NO: 228 - DNA, 20 bp, Homo sapiens
gacacataccgtgacctcca

SEQ ID NO: 229 - DNA, 20 bp, Homo sapiens
ccggcccagtgggtcatcag

SEQ ID NO: 230 - DNA, 20 bp, Homo sapiens
cctggaactgcagatgaagg

SEQ ID NO: 231 - RNA, 25 nt, Artificial Sequence
  Zc3H12A_siRNA_1
ccuggacaacuuccuucguaagaaa

SEQ ID NO: 232 - RNA, 19 nt, Artificial Sequence
  Zc3H12A_siRNA_2
gugucccuauggaaggaaa

SEQ ID NO: 233 - RNA, 19 nt, Artificial Sequence
  Zc3H12A_siRNA_3
caacuuccuucguaagaaa

SEQ ID NO: 234 - DNA, 21 bp, Artificial Sequence
  Zc3H12A_shRNA_1
agcgaggccacacagatatta

SEQ ID NO: 235 - DNA, 21 bp, Artificial Sequence
  Zc3H12A_shRNA_2
gctatgatgaccgcttcattg

SEQ ID NO: 236 - DNA, 21 bp, Artificial Sequence
  Zc3H12A_shRNA_3
tggtctgagccgtacccatta

SEQ ID NO: 237 - DNA, 21 bp, Artificial Sequence
  Zc3H12A_shRNA_4
ctgtgtacagaggcgagattt

SEQ ID NO: 238 - protein, 22 aa, Artificial Sequence
  P2A_linker
GSGATNFSLLKQAGDVEENPGP

SEQ ID NO: 239 - protein, 8 aa, Homo sapiens
SLLMWITQ

SEQ ID NO: 240 - protein, 9 aa, Homo sapiens
AAGIGILTV

SEQ ID NO: 241 - protein, 9 aa, Homo sapiens
RMFPNAPYL

SEQ ID NO: 242 - protein, 310 aa, Homo sapiens
MSNQVLCCVVLCFLGANTVDGGITQSPKYLFRKEGQNVTLSCEQNLNHDAMYWYRQDPGQGLRLIYYSQIVNDFQKGDIAEGYSVSREKKESFPLTVTSAQKNPTAFYLCASSPGALYEQYFGPGTRLTVTEDLKNVFPPEVAVFEPSEAEISHTQKATLVCLATGFYPDHVELSWWVNGKEVHSGVCTDPQPLKEQPALNDSRYCLSSRLRVSATFWQNPRNHFRCQVQFYGLSENDEWTQDRAKPVTQIVSAEAWGRADCGFTSESYQQGVLSATILYEILLGKATLYAVLVSALVLMAMVKRKDSRG

SEQ ID NO: 243 - protein, 270 aa, Homo sapiens
MTSIRAVFIFLWLQLDLVNGENVEQHPSTLSVQEGDSAVIKCTYSDSASNYFPWYKQELGKRPQLIIDIRSNVGEKKDQRIAVTLNKTAKHFSLHITETQPEDSAVYFCAATEDYQLIWGAGTKLIIKPDIQNPDPAVYQLRDSKSSDKSVCLFTDFDSQTNVSQSKDSDVYITDKCVLDMRSMDFKSNSAVAWSNKSDFACANAFNNSIIPEDTFFPSPESSCDVKLVEKSFETDTNLNFQNLSVIGFRILLLKVAGFNLLMTLRLWSS

SEQ ID NO: 244 - protein, 602 aa, Artificial Sequence
  Native_WT1_TCRa_TCRb
MSNQVLCCVVLCFLGANTVDGGITQSPKYLFRKEGQNVTLSCEQNLNHDAMYWYRQDPGQGLRLIYYSQIVNDFQKGDIAEGYSVSREKKESFPLTVTSAQKNPTAFYLCASSPGALYEQYFGPGTRLTVTEDLKNVFPPEVAVFEPSEAEISHTQKATLVCLATGFYPDHVELSWWVNGKEVHSGVCTDPQPLKEQPALNDSRYCLSSRLRVSATFWQNPRNHFRCQVQFYGLSENDEWTQDRAKPVTQIVSAEAWGRADCGFTSESYQQGVLSATILYEILLGKATLYAVLVSALVLMAMVKRKDSRGGSGATNFSLLKQAGDVEENPGPMTSIRAVFIFLWLQLDLVNGENVEQHPSTLSVQEGDSAVIKCTYSDSASNYFPWYKQELGKRPQLIIDIRSNVGEKKDQRIAVTLNKTAKHFSLHITETQPEDSAVYFCAATEDYQLIWGAGTKLIIKPDIQNPDPAVYQLRDSKSSDKSVCLFTDFDSQTNVSQSKDSDVYITDKCVLDMRSMDFKSNSAVAWSNKSDFACANAFNNSIIPEDTFFPSPESSCDVKLVEKSFETDTNLNFQNLSVIGFRILLLKVAGFNLLMTLRLWSS

SEQ ID NO: 245 - protein, 310 aa, Artificial Sequence; identical to SEQ ID NO: 242
  DLT_WT1_TCRb

SEQ ID NO: 246 - protein, 270 aa, Artificial Sequence
  DLT_WT1_TCRa
MTSIRAVFIFLWLQLDLVNGENVEQHPSTLSVQEGDSAVIKCTYSDSASNYFPWYKQELGKRPQLIIDIRSNVGEKKDQRIAVTLNKTAKHFSLHITETQPEDSAVYFCAATEDLTLIWGAGTKLIIKPDIQNPDPAVYQLRDSKSSDKSVCLFTDFDSQTNVSQSKDSDVYITDKCVLDMRSMDFKSNSAVAWSNKSDFACANAFNNSIIPEDTFFPSPESSCDVKLVEKSFETDTNLNFQNLSVIGFRILLLKVAGFNLLMTLRLWSS

SEQ ID NO: 247 - protein, 602 aa, Artificial Sequence
  DLT_WT1_TCRa_TCRb
MSNQVLCCVVLCFLGANTVDGGITQSPKYLFRKEGQNVTLSCEQNLNHDAMYWYRQDPGQGLRLIYYSQIVNDFQKGDIAEGYSVSREKKESFPLTVTSAQKNPTAFYLCASSPGALYEQYFGPGTRLTVTEDLKNVFPPEVAVFEPSEAEISHTQKATLVCLATGFYPDHVELSWWVNGKEVHSGVCTDPQPLKEQPALNDSRYCLSSRLRVSATFWQNPRNHFRCQVQFYGLSENDEWTQDRAKPVTQIVSAEAWGRADCGFTSESYQQGVLSATILYEILLGKATLYAVLVSALVLMAMVKRKDSRGGSGATNFSLLKQAGDVEENPGPMTSIRAVFIFLWLQLDLVNGENVEQHPSTLSVQEGDSAVIKCTYSDSASNYFPWYKQELGKRPQLIIDIRSNVGEKKDQRIAVTLNKTAKHFSLHITETQPEDSAVYFCAATEDLTLIWGAGTKLIIKPDIQNPDPAVYQLRDSKSSDKSVCLFTDFDSQTNVSQSKDSDVYITDKCVLDMRSMDFKSNSAVAWSNKSDFACANAFNNSIIPEDTFFPSPESSCDVKLVEKSFETDTNLNFQNLSVIGFRILLLKVAGFNLLMTLRLWSS

SEQ ID NO: 248 - protein, 311 aa, Homo sapiens
MSIGLLCCAALSLLWAGPVNAGVTQTPKFQVLKTGQSMTLQCAQDMNHEYMSWYRQDPGMGLRLIHYSVGAGITDQGEVPNGYNVSRSTTEDFPLRLLSAAPSQTSVYFCASSYVGNTGELFFGEGSRLTVLEDLKNVFPPEVAVFEPSEAEISHTQKATLVCLATGFYPDHVELSWWVNGKEVHSGVCTDPQPLKEQPALNDSRYCLSSRLRVSATFWQNPRNHFRCQVQFYGLSENDEWTQDRAKPVTQIVSAEAWGRADCGFTSESYQQGVLSATILYEILLGKATLYAVLVSALVLMAMVKRKDSRG

SEQ ID NO: 249 - protein, 274 aa, Homo sapiens
METLLGLLILWLQLQWVSSKQEVTQIPAALSVPEGENLVLNCSFTDSAIYNLQWFRQDPGKGLTSLLLIQSSQREQTSGRLNASLDKSSGRSTLYIAASQPGDSATYLCAVRPTSGGSYIPTFGRGTSLIVHPYIQNPDPAVYQLRDSKSSDKSVCLFTDFDSQTNVSQSKDSDVYITDKCVLDMRSMDFKSNSAVAWSNKSDFACANAFNNSIIPEDTFFPSPESSCDVKLVEKSFETDTNLNFQNLSVIGFRILLLKVAGFNLLMTLRLWSS

SEQ ID NO: 250 - protein, 607 aa, Artificial Sequence
  IG4_NyESO_TCRa_TCRb
MSIGLLCCAALSLLWAGPVNAGVTQTPKFQVLKTGQSMTLQCAQDMNHEYMSWYRQDPGMGLRLIHYSVGAGITDQGEVPNGYNVSRSTTEDFPLRLLSAAPSQTSVYFCASSYVGNTGELFFGEGSRLTVLEDLKNVFPPEVAVFEPSEAEISHTQKATLVCLATGFYPDHVELSWWVNGKEVHSGVCTDPQPLKEQPALNDSRYCLSSRLRVSATFWQNPRNHFRCQVQFYGLSENDEWTQDRAKPVTQIVSAEAWGRADCGFTSESYQQGVLSATILYEILLGKATLYAVLVSALVLMAMVKRKDSRGGSGATNFSLLKQAGDVEENPGPMETLLGLLILWLQLQWVSSKQEVTQIPAALSVPEGENLVLNCSFTDSAIYNLQWFRQDPGKGLTSLLLIQSSQREQTSGRLNASLDKSSGRSTLYIAASQPGDSATYLCAVRPTSGGSYIPTFGRGTSLIVHPYIQNPDPAVYQLRDSKSSDKSVCLFTDFDSQTNVSQSKDSDVYITDKCVLDMRSMDFKSNSAVAWSNKSDFACANAFNNSIIPEDTFFPSPESSCDVKLVEKSFETDTNLNFQNLSVIGFRILLLKVAGFNLLMTLRLWSS

SEQ ID NO: 251 - protein, 311 aa, Artificial Sequence; identical to SEQ ID NO: 248
  95LY_NyESO_TCRb

SEQ ID NO: 252 - protein, 274 aa, Artificial Sequence
  95LY_NyESO_TCRa
METLLGLLILWLQLQWVSSKQEVTQIPAALSVPEGENLVLNCSFTDSAIYNLQWFRQDPGKGLTSLLLIQSSQREQTSGRLNASLDKSSGRSTLYIAASQPGDSATYLCAVRPLYGGSYIPTFGRGTSLIVHPYIQNPDPAVYQLRDSKSSDKSVCLFTDFDSQTNVSQSKDSDVYITDKCVLDMRSMDFKSNSAVAWSNKSDFACANAFNNSIIPEDTFFPSPESSCDVKLVEKSFETDTNLNFQNLSVIGFRILLLKVAGFNLLMTLRLWSS

SEQ ID NO: 253 - protein, 607 aa, Artificial Sequence
  95LY_NyESO_TCRa_TCRb
MSIGLLCCAALSLLWAGPVNAGVTQTPKFQVLKTGQSMTLQCAQDMNHEYMSWYRQDPGMGLRLIHYSVGAGITDQGEVPNGYNVSRSTTEDFPLRLLSAAPSQTSVYFCASSYVGNTGELFFGEGSRLTVLEDLKNVFPPEVAVFEPSEAEISHTQKATLVCLATGFYPDHVELSWWVNGKEVHSGVCTDPQPLKEQPALNDSRYCLSSRLRVSATFWQNPRNHFRCQVQFYGLSENDEWTQDRAKPVTQIVSAEAWGRADCGFTSESYQQGVLSATILYEILLGKATLYAVLVSALVLMAMVKRKDSRGGSGATNFSLLKQAGDVEENPGPMETLLGLLILWLQLQWVSSKQEVTQIPAALSVPEGENLVLNCSFTDSAIYNLQWFRQDPGKGLTSLLLIQSSQREQTSGRLNASLDKSSGRSTLYIAASQPGDSATYLCAVRPLYGGSYIPTFGRGTSLIVHPYIQNPDPAVYQLRDSKSSDKSVCLFTDFDSQTNVSQSKDSDVYITDKCVLDMRSMDFKSNSAVAWSNKSDFACANAFNNSIIPEDTFFPSPESSCDVKLVEKSFETDTNLNFQNLSVIGFRILLLKVAGFNLLMTLRLWSS

SEQ ID NO: 254 - protein, 311 aa, Artificial Sequence
  DMF4_MART_TCRb
MGTRLFFYVALCLLWTGHMDAGITQSPRHKVTETGTPVTLRCHQTENHRYMYWYRQDPGHGLRLIHYSYGVKDTDKGEVSDGYSVSRSKTEDFLLTLESATSSQTSVYFCAISEVGVGQPQHFGDGTRLSILEDLKNVFPPEVAVFEPSEAEISHTQKATLVCLATGFYPDHVELSWWVNGKEVHSGVCTDPQPLKEQPALNDSRYCLSSRLRVSATFWQNPRNHFRCQVQFYGLSENDEWTQDRAKPVTQIVSAEAWGRADCGFTSESYQQGVLSATILYEILLGKATLYAVLVSALVLMAMVKRKDSRG

SEQ ID NO: 255 - protein, 268 aa, Artificial Sequence
  DMF4_MART_TCRa
MLLEHLLIILWMQLTWVSGQQLNQSPQSMFIQEGEDVSMNCTSSSIFNTWLWYKQEPGEGPVLLIALYKAGELTSNGRLTAQFGITRKDSFLNISASIPSDVGIYFCAGGTGNQFYFGTGTSLTVIPNIQNPDPAVYQLRDSKSSDKSVCLFTDFDSQTNVSQSKDSDVYITDKCVLDMRSMDFKSNSAVAWSNKSDFACANAFNNSIIPEDTFFPSPESSCDVKLVEKSFETDTNLNFQNLSVIGFRILLLKVAGFNLLMTLRLWSS

SEQ ID NO: 256 - protein, 601 aa, Artificial Sequence
  DMF4_MART_TCRa_TCRb
MGTRLFFYVALCLLWTGHMDAGITQSPRHKVTETGTPVTLRCHQTENHRYMYWYRQDPGHGLRLIHYSYGVKDTDKGEVSDGYSVSRSKTEDFLLTLESATSSQTSVYFCAISEVGVGQPQHFGDGTRLSILEDLKNVFPPEVAVFEPSEAEISHTQKATLVCLATGFYPDHVELSWWVNGKEVHSGVCTDPQPLKEQPALNDSRYCLSSRLRVSATFWQNPRNHFRCQVQFYGLSENDEWTQDRAKPVTQIVSAEAWGRADCGFTSESYQQGVLSATILYEILLGKATLYAVLVSALVLMAMVKRKDSRGGSGATNFSLLKQAGDVEENPGPMLLEHLLIILWMQLTWVSGQQLNQSPQSMFIQEGEDVSMNCTSSSIFNTWLWYKQEPGEGPVLLIALYKAGELTSNGRLTAQFGITRKDSFLNISASIPSDVGIYFCAGGTGNQFYFGTGTSLTVIPNIQNPDPAVYQLRDSKSSDKSVCLFTDFDSQTNVSQSKDSDVYITDKCVLDMRSMDFKSNSAVAWSNKSDFACANAFNNSIIPEDTFFPSPESSCDVKLVEKSFETDTNLNFQNLSVIGFRILLLKVAGFNLLMTLRLWSS

SEQ ID NO: 257 - protein, 310 aa, Artificial Sequence
  DMF5_MART_TCRb
MRIRLLCCVAFSLLWAGPVIAGITQAPTSQILAAGRRMTLRCTQDMRHNAMYWYRQDLGLGLRLIHYSNTAGTTGKGEVPDGYSVSRANTDDFPLTLASAVPSQTSVYFCASSLSFGTEAFFGQGTRLTVVEDLKNVFPPEVAVFEPSEAEISHTQKATLVCLATGFYPDHVELSWWVNGKEVHSGVCTDPQPLKEQPALNDSRYCLSSRLRVSATFWQNPRNHFRCQVQFYGLSENDEWTQDRAKPVTQIVSAEAWGRADCGFTSESYQQGVLSATILYEILLGKATLYAVLVSALVLMAMVKRKDSRG

SEQ ID NO: 258 - protein, 272 aa, Artificial Sequence
  DMF5_MART_TCRa
MKSLRVLLVILWLQLSWVWSQQKEVEQNSGPLSVPEGAIASLNCTYSDRGSQSFFWYRQYSGKSPELIMFIYSNGDKEDGRFTAQLNKASQYVSLLIRDSQPSDSATYLCAVNFGGGKLIFGQGTELSVKPNIQNPDPAVYQLRDSKSSDKSVCLFTDFDSQTNVSQSKDSDVYITDKCVLDMRSMDFKSNSAVAWSNKSDFACANAFNNSIIPEDTFFPSPESSCDVKLVEKSFETDTNLNFQNLSVIGFRILLLKVAGFNLLMTLRLWSS

SEQ ID NO: 259 - protein, 604 aa, Artificial Sequence
  DMF5_MART_TCRa_TCRb
MRIRLLCCVAFSLLWAGPVIAGITQAPTSQILAAGRRMTLRCTQDMRHNAMYWYRQDLGLGLRLIHYSNTAGTTGKGEVPDGYSVSRANTDDFPLTLASAVPSQTSVYFCASSLSFGTEAFFGQGTRLTVVEDLKNVFPPEVAVFEPSEAEISHTQKATLVCLATGFYPDHVELSWWVNGKEVHSGVCTDPQPLKEQPALNDSRYCLSSRLRVSATFWQNPRNHFRCQVQFYGLSENDEWTQDRAKPVTQIVSAEAWGRADCGFTSESYQQGVLSATILYEILLGKATLYAVLVSALVLMAMVKRKDSRGGSGATNFSLLKQAGDVEENPGPMKSLRVLLVILWLQLSWVWSQQKEVEQNSGPLSVPEGAIASLNCTYSDRGSQSFFWYRQYSGKSPELIMFIYSNGDKEDGRFTAQLNKASQYVSLLIRDSQPSDSATYLCAVNFGGGKLIFGQGTELSVKPNIQNPDPAVYQLRDSKSSDKSVCLFTDFDSQTNVSQSKDSDVYITDKCVLDMRSMDFKSNSAVAWSNKSDFACANAFNNSIIPEDTFFPSPESSCDVKLVEKSFETDTNLNFQNLSVIGFRILLLKVAGFNLLMTLRLWSS

SEQ ID NO: 260 - protein, 142 aa, Homo sapiens
PNIQNPDPAVYQLRDSKSSDKSVCLFTDFDSQTNVSQSKDSDVYITDKTVLDMRSMDFKSNSAVAWSNKSDFACANAFNNSIIPEDTFFPSPESSCDVKLVEKSFETDTNLNFQNLSVIGFRILLLKVAGFNLLMTLRLWSS

SEQ ID NO: 261 - protein, 142 aa, Artificial Sequence
  cys_TRAC
PNIQNPDPAVYQLRDSKSSDKSVCLFTDFDSQTNVSQSKDSDVYITDKCVLDMRSMDFKSNSAVAWSNKSDFACANAFNNSIIPEDTFFPSPESSCDVKLVEKSFETDTNLNFQNLSVIGFRILLLKVAGFNLLMTLRLWSS

SEQ ID NO: 262 - protein, 178 aa, Homo sapiens
DLKNVFPPEVAVFEPSEAEISHTQKATLVCLATGFYPDHVELSWWVNGKEVHSGVSTDPQPLKEQPALNDSRYCLSSRLRVSATFWQNPRNHFRCQVQFYGLSENDEWTQDRAKPVTQIVSAEAWGRADCGFTSESYQQGVLSATILYEILLGKATLYAVLVSALVLMAMVKRKDSRG

SEQ ID NO: 263 - protein, 178 aa, Artificial Sequence
  cys_TRBC
DLKNVFPPEVAVFEPSEAEISHTQKATLVCLATGFYPDHVELSWWVNGKEVHSGVCTDPQPLKEQPALNDSRYCLSSRLRVSATFWQNPRNHFRCQVQFYGLSENDEWTQDRAKPVTQIVSAEAWGRADCGFTSESYQQGVLSATILYEILLGKATLYAVLVSALVLMAMVKRKDSRG

SEQ ID NO: 264 - protein, 444 aa, Artificial Sequence
  KSQCAR017_aa
MLLLVTSLLLCELPHPAFLLIPDILLTQSPVILSVSPGERVSFSCRASQSIGTNIHWYQQRTNGSPRLLIKYASESISGIPSRFSGSGSGTDFTLSINSVESEDIADYYCQQNNNWPTTFGAGTKLELKGGGGSGGGGSGGGGSQVQLKQSGPGLVQPSQSLSITCTVSGFSLTNYGVHWVRQSPGKGLEWLGVIWSGGNTDYNTPFTSRLSINKDNSKSQVFFKMNSLQSNDTAIYYCARALTYYDYEFAYWGQGTLVTVSATTTPAPRPPTPAPTIASQPLSLRPEACRPAAGGAVHTRGLDFACDIYIWAPLAGTCGVLLLSLVITLYCRVKFSRSADAPAYQQGQNQLYNELNLGRREEYDVLDKRRGRDPEMGGKPRRKNPQEGLYNELQKDKMAEAYSEIGMKGERRRGKGHDGLYQGLSTATKDTYDALHMQALPPR

SEQ ID NO: 265 - DNA, 1328 bp, Artificial Sequence
  KSQCAR017_na
atgctcctcctggttactagcttgcttttgtgcgaactgccgcatcctgccttccttctcatcccagatatacttctgacacaatctccggtaatactttccgtctcaccgggggagcgagtgtcattttcatgccgggcgagtcaatccatcgggacgaatattcactggtatcagcaaaggactaacggctcaccacgccttctcatcaagtatgccagtgagtccataagtggcattccctctagattctcaggatcaggcagtggcacggacttcacattgtcaattaatagcgtagaaagtgaggacatagcagattattattgccaacaaaacaataactggcctaccacattcggtgcaggcaccaagcttgagttgaaggggggtggtggttctggaggcggtgggagcggtggtggtgggtcacaagtgcagcttaagcaaagcggaccaggtctggtccaacctagccagtcactgtcaatcacatgtacggtatccggctttagtctgacaaattatggcgtccactgggtaaggcaatcccctggaaagggcctcgagtggttgggggtgatttggagcggaggaaacaccgactataatacccctttcacctccagactgtccataaacaaggacaactctaaaagtcaggtattcttcaaaatgaacagtctgcaaagtaatgacacagcgatatattattgcgcgagagcccttacatactacgattacgagttcgcttattggggacaaggaacgttggtgacggtgtctgccacaaccactcctgctcccaggccaccaacaccggcgcctaccatagcgtcacagccgcttagtctcaggccggaagcgtgtcgccccgcagccggtggggcggtccacacacgcgggctggatttcgcatgcgatatatacatctgggcaccccttgccgggacctgcggtgttttgctcttgtctctcgtaatcacgctgtactgtcgggttaagttttcaagatctgcggatgccccggcataccaacaagggcagaatcagttgtacaacgaactgaacttgggcagacgcgaggagtatgatgtcttggacaagaggcgggggcgcgacccggaaatgggtggcaaaccacggcgcaagaacccacaagaggggctttacaacgaattgcagaaagacaagatggccgaggcatacagcgagattggcatgaaaggagagaggaggaggggaaaggggcatgatggcctttatcagggcctttctactgccaccaaggacacatacgacgcactgcacatgcaggcattgccacc

SEQ ID NO: 266 - protein, 446 aa, Artificial Sequence
  KSQCAR1909_aa
MLLLVTSLLLCELPHPAFLLIPDIQMTQTTSSLSASLGDRVTISCRASQDISKYLNWYQQKPDGTVKLLIYHTSRLHSGVPSRFSGSGSGTDYSLTISNLEQEDIATYFCQQGNTLPYTFGGGTKLEITGGGGSGGGGSGGGGSEVKLQESGPGLVAPSQSLSVTCTVSGVSLPDYGVSWIRQPPRKGLEWLGVIWGSETTYYNSALKSRLTIIKDNSKSQVFLKMNSLQTDDTAIYYCAKHYYYGGSYAMDYWGQGTSVTVSSTTTPAPRPPTPAPTIASQPLSLRPEACRPAAGGAVHTRGLDFACDIYIWAPLAGTCGVLLLSLVITLYCLRVKFSRSADAPAYQQGQNQLYNELNLGRREEYDVLDKRRGRDPEMGGKPRRKNPQEGLYNELQKDKMAEAYSEIGMKGERRRGKGHDGLYQGLSTATKDTYDALHMQALPPR

SEQ ID NO: 267 - DNA, 1338 bp, Artificial Sequence
  KSQCAR1909_na
atgctccttcttgtgacgtcactcctgctttgtgagctgccgcacccggcctttctgctcatacccgacatacaaatgacacagacgacaagttccctttccgcctccttgggcgaccgagtgacaatcagttgccgagcttcccaggacatatctaaatatttgaattggtatcagcaaaagccagatggtacggttaaacttcttatctaccacacctccaggctccattctggggttccgagccgattctctggatctggctcagggaccgattattctttgactatttccaatttggagcaggaagacatcgcaacctatttctgccaacaaggaaatacgctgccatacaccttcggcgggggcaccaaactcgagattactgggggtggggggagtggaggagggggttccggtggaggtgggtcagaagtcaagctgcaagagagtgggcccgggttggttgctcctagccaatccttgagtgtaacatgcaccgttagcggagtttcacttcctgactacggtgttagctggataagacagcccccgaggaagggtctggaatggctgggggtcatttggggcagtgagacgacatattacaacagtgccttgaaatccaggcttacgatcataaaagacaatagtaaaagccaagtgttcctcaagatgaactctcttcagaccgacgacacagccatctactattgcgcaaaacattattattatggaggtagttacgctatggactattggggccaggggacttcagtgacggtgagtagtaccacgactccggcaccgagaccaccaacaccagccccaacaattgcctcacagcccttgagccttagacccgaggcctgtaggcccgccgcaggaggggcagttcatacgcgaggattggactttgcatgtgacatctatatctgggcgccacttgcgggaacttgcggtgtccttttgctctcattggtcattaccctctattgtttgagagtaaaattttcccgctccgctgatgcgcctgcataccagcaaggtcagaaccaactctacaatgagcttaacctcggtagaagagaggaatatgacgtcttggataagaggagaggccgagacccagaaatggggggaaagccgcgccgcaagaatccacaagaaggtctttacaatgaactgcagaaggacaaaatggccgaagcgtatagcgagataggaatgaaaggcgaacggagacggggcaaggggcatgacgggctttaccaaggacttagcacagcgacgaaggatacatacgacgcactgcatatgcaagcgctgccaccgcgc

SEQ ID NO: 268 - protein, 496 aa, Artificial Sequence
  KSQCAR010_aa
MDFQVQIFSFLLISASVIMSRGATGGATTTTCAGGTGCAGATTTTCAGCTTCCTGCTAATCAGTGCCTCADIQMTQSPSSLSASVGDRVTITCRASQDVNTAVAWYQQKPGKAPKLLIYSASFLYSGVPSRFSGSRSGTDFTLTISSLQPEDFATYYCQQHYTTPPTFGQGTKVEIKRTGSTSGSGKPGSGEGSEVQLVESGGGLVQPGGSLRLSCAASGFNIKDTYIHWVRQAPGKGLEWVARIYPTNGYTRYADSVKGRFTISADTSKNTAYLQMNSLRAEDTAVYYCSRWGGDGFYAMDVWGQGTLVTVSSTTTPAPRPPTPAPTIASQPLSLRPEACRPAAGGAVHTRGLDFACDIYIWAPLAGTCGVLLLSLVITLYCLRVKFSRSADAPAYQQGQNQLYNELNLGRREEYDVLDKRRGRDPEMGGKPRRKNPQEGLYNELQKDKMAEAYSEIGMKGERRRGKGHDGLYQGLSTATKDTYDALHMQALPPR

SEQ ID NO: 269 - DNA, 1488 bp, Artificial Sequence
  KSQCAR010_na
atggactttcaggtgcagatcttctcattcctccttatcagtgcgagtgtaattatgtcaagaggtgctacaggcggtgctaccacgacgacatgcgcagggggtaccggttgtgcaggagcgaccacgactacctgcgcaggttgtaccacctgttgtactggatgtactgctgcgacatgtgcggggacgggttgttgcacttgtgcggacatacaaatgacgcaaagcccgtccagcctgtctgcatcagttggggatagagtgacgattacatgtagagcaagccaggatgttaacaccgccgtagcgtggtaccaacaaaaaccaggtaaagccccgaagctgctcatatactccgccagctttctgtattcaggcgttcccagtcggttcagcggcagcagatcagggacggattttacgctcactatctcttcccttcagcctgaagattttgctacctattattgtcagcagcattacacgactcccccaacttttggtcaggggactaaagttgaaatcaaacgaacgggctccacctcaggtagcggtaagccaggcagcggagaagggtctgaagtccagttggttgagagtggaggcggtcttgtgcaacccggtggcagcttgcgactgagctgtgcagcgtctggcttcaacataaaagatacttatattcattgggtaagacaggctcctggtaaagggctggaatgggtggcacgaatatatccgactaacggttataccagatacgccgattctgttaagggcaggttcacaataagcgccgacacaagtaagaatacggcgtatctgcagatgaattcacttcgagctgaagacacagcggtatactactgctccaggtggggtggggatggtttttatgcgatggacgtttggggtcaaggaacactggtaactgttagttctaccacgacacctgctcctaggccccccacaccggcacctacgatcgcttcccagccgcttagcctccgcccggaggcatgccggcccgctgcggggggagcggtacatactcgcgggttggacttcgcttgcgacatctacatttgggcaccactggcaggcacatgtggcgttctgttgcttagtctggttattacactgtattgcctgcgagttaaattctcccgcagcgctgatgcgcccgcctatcagcaaggtcaaaaccagctgtataatgagcttaatttgggacgccgagaagagtatgacgtccttgacaagaggcgcgggcgcgatccggagatgggtggtaaaccgcgccggaaaaacccccaggaaggcctttacaatgagctccaaaaagataaaatggcagaggcatactctgaaataggaatgaagggcgagagacgccggggtaagggacacgatggcctttatcaagggcttagtacagccacgaaggatacgtatgacgctctgcacatgcaggctcttcccccgaga

SEQ ID NO: 270 - DNA, 20 bp, Homo sapiens
cggaggatcttatgctgaac

SEQ ID NO: 271 - DNA, 20 bp, Homo sapiens
ccttatcttcagtcacatgc

SEQ ID NO: 272 - DNA, 20 bp, Homo sapiens
ccatgactatcctcatagag

SEQ ID NO: 273 - DNA, 20 bp, Homo sapiens
ctcttcgaactcccgctcga

SEQ ID NO: 274 - DNA, 20 bp, Homo sapiens
gaaccctgaccatgggcctg

SEQ ID NO: 275 - DNA, 20 bp, Homo sapiens
gctccttgaaccctgaccat

SEQ ID NO: 276 - DNA, 20 bp, Homo sapiens
agttggatactcagcgtcgc

SEQ ID NO: 277 - DNA, 20 bp, Homo sapiens
ccgctcgatggtggtgggca

SEQ ID NO: 278 - DNA, 20 bp, Homo sapiens
cagaaatggcagcatgtgtt

SEQ ID NO: 279 - DNA, 20 bp, Homo sapiens
gcactacagtggatcaccgc

SEQ ID NO: 280 - DNA, 20 bp, Homo sapiens
ggtagacacttgtcttgttt

SEQ ID NO: 281 - DNA, 20 bp, Homo sapiens
tggcagcatgtgttaggaag

SEQ ID NO: 282 - DNA, 20 bp, Homo sapiens
aggcccatggtcagggttca

SEQ ID NO: 283 - DNA, 20 bp, Homo sapiens
gttcagcatgacaactgctt

SEQ ID NO: 284 - DNA, 20 bp, Homo sapiens
caatggaggagaacagtgag

SEQ ID NO: 285 - DNA, 20 bp, Homo sapiens
ctcttctatgtcaactaaac

SEQ ID NO: 286 - DNA, 20 bp, Homo sapiens
agtggatcaccgcaggccca

SEQ ID NO: 287 - DNA, 20 bp, Homo sapiens
ctgacaggtgaccgatgtac

SEQ ID NO: 288 - DNA, 20 bp, Homo sapiens
aactcccgctcgatggtggt

SEQ ID NO: 289 - DNA, 20 bp, Homo sapiens
gtctccctgatccatccagt

SEQ ID NO: 290 - DNA, 20 bp, Homo sapiens
tagaggaaagtcctgtacat

SEQ ID NO: 291 - DNA, 20 bp, Homo sapiens
atgtatggaaaggatggtaa

SEQ ID NO: 292 - DNA, 20 bp, Homo sapiens
gcccaatgcctgcactacag

SEQ ID NO: 293 - DNA, 20 bp, Homo sapiens
cgagcgggagttcgaagagt

SEQ ID NO: 294 - DNA, 20 bp, Homo sapiens
tcaccgcaggcccatggtca

SEQ ID NO: 295 - DNA, 20 bp, Homo sapiens
cagtttagttgacatagaag

SEQ ID NO: 296 - DNA, 20 bp, Homo sapiens
ccatgcccaccaccatcgag

SEQ ID NO: 297 - DNA, 20 bp, Homo sapiens
gccaaaccataagccagaaa

SEQ ID NO: 298 - DNA, 20 bp, Homo sapiens
ccgattctttctccacaatg

SEQ ID NO: 299 - DNA, 20 bp, Homo sapiens
ttcgaactcccgctcgatgg

SEQ ID NO: 300 - DNA, 20 bp, Homo sapiens
agtgcaggcattgggcgctc

SEQ ID NO: 301 - DNA, 20 bp, Homo sapiens
ggaaacttggccactctatg

SEQ ID NO: 302 - DNA, 20 bp, Homo sapiens
atccactgtagtgcaggcat

SEQ ID NO: 303 - DNA, 20 bp, Homo sapiens
cactctatgaggatagtcat

SEQ ID NO: 304 - DNA, 20 bp, Homo sapiens
ccactctatgaggatagtca

SEQ ID NO: 305 - DNA, 20 bp, Homo sapiens
tccactgtagtgcaggcatt

SEQ ID NO: 306 - DNA, 20 bp, Homo sapiens
aagttctttccatcgtttct

SEQ ID NO: 307 - DNA, 20 bp, Homo sapiens
tcgctggcagccgctgtact

SEQ ID NO: 308 - DNA, 20 bp, Homo sapiens
gaactcccgctcgatggtgg

SEQ ID NO: 309 - DNA, 20 bp, Homo sapiens
aggatggtaaaggcaccaac

SEQ ID NO: 310 - DNA, 20 bp, Homo sapiens
aaagggagattctagtatac

SEQ ID NO: 311 - DNA, 20 bp, Homo sapiens
agaatttaggatgtatggaa

SEQ ID NO: 312 - DNA, 20 bp, Homo sapiens
gggtctgaataagacccatt

SEQ ID NO: 313 - DNA, 20 bp, Homo sapiens
ggcaccaactggatggatca

SEQ ID NO: 314 - DNA, 20 bp, Homo sapiens
ctctaaaatgcaagatacaa

SEQ ID NO: 315 - DNA, 20 bp, Homo sapiens
gtatttgaaattattaatgc

SEQ ID NO: 316 - DNA, 20 bp, Homo sapiens
cctttcttgcagatggaaaa

SEQ ID NO: 317 - DNA, 20 bp, Homo sapiens
ctgcaccttctgagctgtgg

SEQ ID NO: 318 - DNA, 20 bp, Homo sapiens
atgctgccatttctggctta

SEQ ID NO: 319 - DNA, 20 bp, Homo sapiens
tttctttaaacagcatctct

SEQ ID NO: 320 - DNA, 20 bp, Homo sapiens
agacatggaatgcagaatgc

SEQ ID NO: 321 - DNA, 20 bp, Homo sapiens
aggcaccaactggatggatc

SEQ ID NO: 322 - DNA, 20 bp, Homo sapiens
taatgactgaaaaatacaat

SEQ ID NO: 323 - DNA, 20 bp, Homo sapiens
gaatgcagaatgcaggaaat

SEQ ID NO: 324 - DNA, 20 bp, Homo sapiens
tttaggatgtatggaaagga

SEQ ID NO: 325 - DNA, 20 bp, Homo sapiens
ctaacacatgctgccatttc

SEQ ID NO: 326 - DNA, 20 bp, Homo sapiens
tcatacatggctataataga

SEQ ID NO: 327 - DNA, 20 bp, Homo sapiens
acgatggaaagaactttcta

SEQ ID NO: 328 - DNA, 20 bp, Homo sapiens
acgtattcgagaggacagaa

SEQ ID NO: 329 - DNA, 20 bp, Homo sapiens
gcggtgatccactgtagtgc

SEQ ID NO: 330 - DNA, 20 bp, Homo sapiens
tattaatgctggatgttaaa

SEQ ID NO: 331 - DNA, 20 bp, Homo sapiens
gagatgctgtttaaagaaac

SEQ ID NO: 332 - DNA, 20 bp, Homo sapiens
cagcaagaatttaggatgta

SEQ ID NO: 333 - DNA, 20 bp, Homo sapiens
ttgacatagaagaggcacaa

SEQ ID NO: 334 - DNA, 20 bp, Homo sapiens
gattcagggactccaaaatc

SEQ ID NO: 335 - DNA, 20 bp, Homo sapiens
ctcactttcattatactacc

SEQ ID NO: 336 - DNA, 20 bp, Homo sapiens
tttagtatattgagaacttg

SEQ ID NO: 337 - DNA, 20 bp, Homo sapiens
agggactccaaaatctggcc

SEQ ID NO: 338 - DNA, 20 bp, Homo sapiens
aggttaaatgtgcacagtac

SEQ ID NO: 339 - DNA, 20 bp, Homo sapiens
atcaccgcaggcccatggtc

SEQ ID NO: 340 - DNA, 20 bp, Homo sapiens
agcatctcttggtcatctgt

SEQ ID NO: 341 - DNA, 20 bp, Homo sapiens
gaaggagcaaaatgtataaa

SEQ ID NO: 342 - DNA, 20 bp, Homo sapiens
gccatttctggcttatggtt

SEQ ID NO: 343 - DNA, 20 bp, Homo sapiens
ctggatggatcagggagaca

SEQ ID NO: 344 - DNA, 20 bp, Homo sapiens
aaatacaatgggaacagaat

SEQ ID NO: 345 - DNA, 20 bp, Homo sapiens
ataatgactgaaaaatacaa

SEQ ID NO: 346 - DNA, 20 bp, Homo sapiens
catgcccaccaccatcgagc

SEQ ID NO: 347 - DNA, 20 bp, Homo sapiens
aacatgagaaaataccgaat

SEQ ID NO: 348 - DNA, 20 bp, Homo sapiens
agaaatgaagctggtgattc

SEQ ID NO: 349 - DNA, 20 bp, Homo sapiens
ccgcattgtggagaaagaat

SEQ ID NO: 350 - DNA, 20 bp, Homo sapiens
gaaatgaagctggtgattca

SEQ ID NO: 351 - DNA, 20 bp, Homo sapiens
ttgtttaaagtgagagaatc

SEQ ID NO: 352 - DNA, 20 bp, Homo sapiens
ccgcgactcaccaagtacag

SEQ ID NO: 353 - DNA, 20 bp, Homo sapiens
gaacatgagaaaataccgaa

SEQ ID NO: 354 - DNA, 20 bp, Homo sapiens
tatactacctggccagattt

SEQ ID NO: 355 - DNA, 20 bp, Homo sapiens
tatgagaatctcagttgatc

SEQ ID NO: 356 - DNA, 20 bp, Homo sapiens
tcaactgagattctcataca

SEQ ID NO: 357 - DNA, 20 bp, Homo sapiens
tgagaatctcagttgatctg

SEQ ID NO: 358 - DNA, 20 bp, Homo sapiens
atgagaatctcagttgatct

SEQ ID NO: 359 - DNA, 20 bp, Homo sapiens
tggtaaaggcaccaactgga

SEQ ID NO: 360 - DNA, 20 bp, Homo sapiens
tgtcatgctgaaccgcattg

SEQ ID NO: 361 - DNA, 20 bp, Homo sapiens
tttggtgaatgatcaaaggc

SEQ ID NO: 362 - DNA, 20 bp, Homo sapiens
atgaaagtgagatattgttc

SEQ ID NO: 363 - DNA, 20 bp, Homo sapiens
tatttcctcatagtgctcta

SEQ ID NO: 364 - DNA, 20 bp, Homo sapiens
agaaggagcaaaatgtataa

SEQ ID NO: 365 - DNA, 20 bp, Homo sapiens
tttgtttggtgaatgatcaa

SEQ ID NO: 366 - DNA, 20 bp, Homo sapiens
tctacggaaacgtattcgag

SEQ ID NO: 367 - DNA, 20 bp, Homo sapiens
aaaggccaccacagctcaga

SEQ ID NO: 368 - DNA, 20 bp, Homo sapiens
aggtgcagcagatgaaacag

SEQ ID NO: 369 - DNA, 20 bp, Homo sapiens
ggctccttgaaccctgacca

SEQ ID NO: 370 - DNA, 20 bp, Homo sapiens
aaggagttacatcttaacac

SEQ ID NO: 371 - DNA, 20 bp, Homo sapiens
taaaatgcaagatacaatgg

SEQ ID NO: 372 - DNA, 20 bp, Homo sapiens
acaagtgtctaccagagaga

SEQ ID NO: 373 - DNA, 20 bp, Homo sapiens
gcgctctggcaccttctctc

SEQ ID NO: 374 - DNA, 20 bp, Homo sapiens
ctgctgcaccttctgagctg

SEQ ID NO: 375 - DNA, 20 bp, Homo sapiens
tcttccctacctagaaacga

SEQ ID NO: 376 - DNA, 20 bp, Homo sapiens
gtcctctccctcccagccat

SEQ ID NO: 377 - DNA, 20 bp, Homo sapiens
tccccagggtcccgccaaga

SEQ ID NO: 378 - DNA, 20 bp, Homo sapiens
agtgagcagtgcagcctgga

SEQ ID NO: 379 - DNA, 20 bp, Homo sapiens
tgtcctctccctcccagcca

SEQ ID NO: 380 - DNA, 20 bp, Homo sapiens
ctggactgggatgaaggtga

SEQ ID NO: 381 - DNA, 20 bp, Homo sapiens
ggggtgggcccggctcacca

SEQ ID NO: 382 - DNA, 20 bp, Homo sapiens
caccaccccgcgggactaga

SEQ ID NO: 383 - DNA, 20 bp, Homo sapiens
ctgctgccactgcccccgct

SEQ ID NO: 384 - DNA, 20 bp, Homo sapiens
cggcccgacgtgcccatcac

SEQ ID NO: 385 - DNA, 20 bp, Homo sapiens
cactgcccccgctaggtgcg

SEQ ID NO: 386 - DNA, 20 bp, Homo sapiens
atacacgctggcctgctcct

SEQ ID NO: 387 - DNA, 20 bp, Homo sapiens
caaacactgtgatgtctgtg

SEQ ID NO: 388 - DNA, 20 bp, Homo sapiens
gcgggaccctggggatgcct

SEQ ID NO: 389 - DNA, 20 bp, Homo sapiens
gcgggagcgccagacctcac

SEQ ID NO: 390 - DNA, 20 bp, Homo sapiens
aggacaggcttctctccaca

SEQ ID NO: 391 - DNA, 20 bp, Homo sapiens
gcagacaccaacacggtgct

SEQ ID NO: 392 - DNA, 20 bp, Homo sapiens
ccaccaccccgcgggactag

SEQ ID NO: 393 - DNA, 20 bp, Homo sapiens
atccccagggtcccgccaag

SEQ ID NO: 394 - DNA, 20 bp, Homo sapiens
cctggaggaaggagcagcct

SEQ ID NO: 395 - DNA, 20 bp, Homo sapiens
agagccagatgtcggaactt

SEQ ID NO: 396 - DNA, 20 bp, Homo sapiens
atgacccactgggccggcac

SEQ ID NO: 397 - DNA, 20 bp, Homo sapiens
gcagctttgggcccacagac

SEQ ID NO: 398 - DNA, 20 bp, Homo sapiens
actctctgttagcagagagc

SEQ ID NO: 399 - DNA, 20 bp, Homo sapiens
ccaggaaggaaatgcaccta

SEQ ID NO: 400 - DNA, 20 bp, Homo sapiens
aggcaccactcacctgtgat

SEQ ID NO: 401 - DNA, 20 bp, Homo sapiens
ctgggcccgtgccggcccag

SEQ ID NO: 402 - DNA, 20 bp, Homo sapiens
cagccagctgctgggggtcc

SEQ ID NO: 403 - DNA, 20 bp, Homo sapiens
tccactcctgccgctcgcct

SEQ ID NO: 404 - DNA, 20 bp, Homo sapiens
cgtccaggcagacaccaaca

SEQ ID NO: 405 - DNA, 20 bp, Homo sapiens
cccacccacatcagtccttc

SEQ ID NO: 406 - DNA, 20 bp, Homo sapiens
gccagctcttgacccggcct

SEQ ID NO: 407 - DNA, 20 bp, Homo sapiens
ctgccctccttttcctcttc

SEQ ID NO: 408 - DNA, 20 bp, Homo sapiens
ccagccccaccatgagtctg

SEQ ID NO: 409 - DNA, 20 bp, Homo sapiens
gccgattcttccacccagag

SEQ ID NO: 410 - DNA, 20 bp, Homo sapiens
ctcccagaagaggaaaagga

SEQ ID NO: 411 - DNA, 20 bp, Homo sapiens
gtggggcagggcaggcagcc

SEQ ID NO: 412 - DNA, 20 bp, Homo sapiens
gggtcaagagctggccgctg

SEQ ID NO: 413 - DNA, 20 bp, Homo sapiens
atgccccctgatgacccact

SEQ ID NO: 414 - DNA, 20 bp, Homo sapiens
agccttctctgcctttggcc

SEQ ID NO: 415 - DNA, 20 bp, Homo sapiens
ctctgcctttggccgggcca

SEQ ID NO: 416 - DNA, 20 bp, Homo sapiens
ggaacccagcctgccctccc

SEQ ID NO: 417 - DNA, 20 bp, Homo sapiens
ggcaggagcctcgcacctag

SEQ ID NO: 418 - DNA, 20 bp, Homo sapiens
tcccagaccagcacatcctg

SEQ ID NO: 419 - DNA, 20 bp, Homo sapiens
gtgagcagtgcagcctggat

SEQ ID NO: 420 - DNA, 20 bp, Homo sapiens
gagccagatgtcggaacttt

SEQ ID NO: 421 - DNA, 20 bp, Homo sapiens
ggccgatggcaagccttgct

SEQ ID NO: 422 - DNA, 20 bp, Homo sapiens
aggagcctcgcacctagcgg

SEQ ID NO: 423 - DNA, 20 bp, Homo sapiens
aggtccccaagaggaaaaca

SEQ ID NO: 424 - DNA, 20 bp, Homo sapiens
cgctgaggaggcctcggccc

SEQ ID NO: 425 - DNA, 20 bp, Homo sapiens
gaggacagccacagccgtca

SEQ ID NO: 426 - DNA, 20 bp, Homo sapiens
cagccccaccatgagtctgt

SEQ ID NO: 427 - DNA, 20 bp, Homo sapiens
accccccagagccccaagca

SEQ ID NO: 428 - DNA, 20 bp, Homo sapiens
gaggcaccactcacctgtga

SEQ ID NO: 429 - DNA, 20 bp, Homo sapiens
ccaagaggaaaacagggcac

SEQ ID NO: 430 - DNA, 20 bp, Homo sapiens
gtacgtctcccaggattgcc

SEQ ID NO: 431 - DNA, 20 bp, Homo sapiens
cacagcctccaccaggtgcg

SEQ ID NO: 432 - DNA, 20 bp, Homo sapiens
gatctcggcagccagctgct

SEQ ID NO: 433 - DNA, 20 bp, Homo sapiens
cagccttctctgcctttggc

SEQ ID NO: 434 - DNA, 20 bp, Homo sapiens
cagaagtgacacttacctca

SEQ ID NO: 435 - DNA, 20 bp, Homo sapiens
gctggccgctgaggaggcct

SEQ ID NO: 436 - DNA, 20 bp, Homo sapiens
cagctccctctagtcccgcg

SEQ ID NO: 437 - DNA, 20 bp, Homo sapiens
cggggtgggcccggctcacc

SEQ ID NO: 438 - DNA, 20 bp, Homo sapiens
gacacataccgtgacctcca

SEQ ID NO: 439 - DNA, 20 bp, Homo sapiens
caggaaggaaatgcacctat

SEQ ID NO: 440 - DNA, 20 bp, Homo sapiens
agtggccagcacccatggcc

SEQ ID NO: 441 - DNA, 20 bp, Homo sapiens
ctctcctattcttcccagca

SEQ ID NO: 442 - DNA, 20 bp, Homo sapiens
gcccgagtccaggcaatcct

SEQ ID NO: 443 - DNA, 20 bp, Homo sapiens
caccttcatctgcagttcca

SEQ ID NO: 444 - DNA, 20 bp, Homo sapiens
ggcacaggcagacaggtgag

SEQ ID NO: 445 - DNA, 20 bp, Homo sapiens
agcacccatggcccggccaa

SEQ ID NO: 446 - DNA, 20 bp, Homo sapiens
ccacaggcagcttactcact

SEQ ID NO: 447 - DNA, 20 bp, Homo sapiens
ttcctgtgctccaaagtgag

SEQ ID NO: 448 - DNA, 20 bp, Homo sapiens
accgcagccttctctgcctt

SEQ ID NO: 449 - DNA, 20 bp, Homo sapiens
gggagccaatgcccgagtcc

SEQ ID NO: 450 - DNA, 20 bp, Homo sapiens
ttcccagcaaggcttgccat

SEQ ID NO: 451 - DNA, 20 bp, Homo sapiens
agccagatgtcggaactttg

SEQ ID NO: 452 - DNA, 20 bp, Homo sapiens
tacacgggctacagtcccta

SEQ ID NO: 453 - DNA, 20 bp, Homo sapiens
tctgtgttagaccctcttgg

SEQ ID NO: 454 - DNA, 20 bp, Homo sapiens
aagctgcccccagcgctctg

SEQ ID NO: 455 - DNA, 20 bp, Homo sapiens
ctttggggggttcgaggagg

SEQ ID NO: 456 - DNA, 20 bp, Homo sapiens
gggccgatggcaagccttgc

SEQ ID NO: 457 - DNA, 20 bp, Homo sapiens
cacaggcagcttactcactg

SEQ ID NO: 458 - DNA, 20 bp, Homo sapiens
cccagaccagcacatcctgc

SEQ ID NO: 459 - DNA, 20 bp, Homo sapiens
aggctgggttccataccata

SEQ ID NO: 460 - DNA, 20 bp, Homo sapiens
ggacttctaattgctgagaa

SEQ ID NO: 461 - DNA, 20 bp, Homo sapiens
ctcaaattcccacagactca

SEQ ID NO: 462 - DNA, 20 bp, Homo sapiens
aaaacagggcacaggcagac

SEQ ID NO: 463 - DNA, 20 bp, Homo sapiens
ccagatgtcggaactttggg

SEQ ID NO: 464 - DNA, 20 bp, Homo sapiens
ctccctctagtcccgcgggg

SEQ ID NO: 465 - DNA, 20 bp, Homo sapiens
agcccccagtgcagagccca

SEQ ID NO: 466 - DNA, 20 bp, Homo sapiens
cctggacgcccagcttctgc

SEQ ID NO: 467 - DNA, 20 bp, Homo sapiens
caggggctggcaggagcccg

SEQ ID NO: 468 - DNA, 20 bp, Homo sapiens
ccttgttcccatggctggga

SEQ ID NO: 469 - DNA, 20 bp, Homo sapiens
ctcatctgccacagagcgct

SEQ ID NO: 470 - DNA, 20 bp, Homo sapiens
ggcagacaccaacacggtgc

SEQ ID NO: 471 - DNA, 20 bp, Homo sapiens
tccctcttgattcctcttcc

SEQ ID NO: 472 - DNA, 20 bp, Homo sapiens
ccctcccagccatgggaaca

SEQ ID NO: 473 - DNA, 20 bp, Homo sapiens
gcgtaagaagccactcactt

SEQ ID NO: 474 - DNA, 20 bp, Homo sapiens
tgtgtttcccccgcacctgg

SEQ ID NO: 475 - DNA, 20 bp, Homo sapiens
ctgagaccagtggtcatcga

SEQ ID NO: 476 - DNA, 20 bp, Homo sapiens
gggcagcgacctgagaccag

SEQ ID NO: 477 - DNA, 20 bp, Homo sapiens
agcaattagaagtccctgca

SEQ ID NO: 478 - DNA, 20 bp, Homo sapiens
tgggtgagctggtgaaacac

SEQ ID NO: 479 - DNA, 20 bp, Homo sapiens
ctgttagcagagagctggac

SEQ ID NO: 480 - DNA, 20 bp, Homo sapiens
cccctgatgacccactgggc

SEQ ID NO: 481 - DNA, 20 bp, Homo sapiens
gttcacaccatcacgacgcg

SEQ ID NO: 482 - DNA, 20 bp, Homo sapiens
tgtccaggctgggcccgtgc

SEQ ID NO: 483 - DNA, 20 bp, Homo sapiens
acacagacctatgccccatc

SEQ ID NO: 484 - DNA, 20 bp, Homo sapiens
ggctgcctgccctgccccac

SEQ ID NO: 485 - DNA, 20 bp, Homo sapiens
ccataggtgcatttccttcc

SEQ ID NO: 486 - DNA, 20 bp, Homo sapiens
caggctgggttccataccat

SEQ ID NO: 487 - DNA, 20 bp, Homo sapiens
gccccatcacagcctccacc

SEQ ID NO: 488 - DNA, 20 bp, Homo sapiens
tgccctccttttcctcttct

SEQ ID NO: 489 - DNA, 20 bp, Homo sapiens
gccagatgtcggaactttgg

SEQ ID NO: 490 - DNA, 20 bp, Homo sapiens
caggcagacaggtgagagga

SEQ ID NO: 491 - DNA, 20 bp, Homo sapiens
ccaggagtctgagctatgag

SEQ ID NO: 492 - DNA, 20 bp, Homo sapiens
gctccaggttgggagcctta

SEQ ID NO: 493 - DNA, 20 bp, Homo sapiens
ctcacctgtgatgggcacgt

SEQ ID NO: 494 - DNA, 20 bp, Homo sapiens
agctggcctacgagtctgac

SEQ ID NO: 495 - DNA, 20 bp, Homo sapiens
gtgggtgggggcagtgggta

SEQ ID NO: 496 - DNA, 20 bp, Homo sapiens
catctgcagttccagggccg

SEQ ID NO: 497 - DNA, 20 bp, Homo sapiens
gatgacccactgggccggca

SEQ ID NO: 498 - DNA, 20 bp, Homo sapiens
tgacctccaaggcgagcggc

SEQ ID NO: 499 - DNA, 20 bp, Homo sapiens
ggatctcggcagccagctgc

SEQ ID NO: 500 - DNA, 20 bp, Homo sapiens
tccttttcctcttctgggag

SEQ ID NO: 501 - DNA, 20 bp, Homo sapiens
cacgacgcgtgggtggcaag

SEQ ID NO: 502 - DNA, 20 bp, Homo sapiens
ttcacaccatcacgacgcgt

SEQ ID NO: 503 - DNA, 20 bp, Homo sapiens
gcaggagcctcgcacctagc

SEQ ID NO: 504 - DNA, 20 bp, Homo sapiens
cacccctaaggctcccaacc

SEQ ID NO: 505 - DNA, 20 bp, Homo sapiens
ttgtccttgcttggggctct

SEQ ID NO: 506 - DNA, 20 bp, Homo sapiens
caggacaggcttctctccac

SEQ ID NO: 507 - DNA, 20 bp, Homo sapiens
cacctggtggaggctgtgat

SEQ ID NO: 508 - DNA, 20 bp, Homo sapiens
cgtctgtgggagccagtctg

SEQ ID NO: 509 - DNA, 20 bp, Homo sapiens
ccccccaaagttccgacatc

SEQ ID NO: 510 - DNA, 20 bp, Homo sapiens
aggcagcctggccaaggagc

SEQ ID NO: 511 - DNA, 20 bp, Homo sapiens
tctgcctttggccgggccat

SEQ ID NO: 512 - DNA, 20 bp, Homo sapiens
ggacaggcttctctccacag

SEQ ID NO: 513 - DNA, 20 bp, Homo sapiens
acgtgcccatcacaggtgag

SEQ ID NO: 514 - DNA, 20 bp, Homo sapiens
agagagtgagcagtgcagcc

SEQ ID NO: 515 - DNA, 20 bp, Homo sapiens
cgcaggaagttgtccaggct

SEQ ID NO: 516 - DNA, 20 bp, Homo sapiens
ggctgggagctcagatccat

SEQ ID NO: 517 - DNA, 20 bp, Homo sapiens
cagctcacccagcaccgtgt

SEQ ID NO: 518 - DNA, 20 bp, Homo sapiens
ccagcacatcctgcgggaac

SEQ ID NO: 519 - DNA, 20 bp, Homo sapiens
gacctccttgttcccatggc

SEQ ID NO: 520 - DNA, 20 bp, Homo sapiens
ggggttcgaggaggaggccc

SEQ ID NO: 521 - DNA, 20 bp, Homo sapiens
cagagaaggctgcggtggct

SEQ ID NO: 522 - DNA, 20 bp, Homo sapiens
gggagtgagtccagcgtctg

SEQ ID NO: 523 - DNA, 20 bp, Homo sapiens
caggagcctcgcacctagcg

SEQ ID NO: 524 - DNA, 20 bp, Homo sapiens
ggaggaggccctggtgagcc

SEQ ID NO: 525 - DNA, 20 bp, Homo sapiens
caagcaaggacaaaaatggc

SEQ ID NO: 526 - DNA, 20 bp, Homo sapiens
cgtcagggcaccccaaggcc

SEQ ID NO: 527 - DNA, 20 bp, Homo sapiens
gctggcagtgaactggtttc

SEQ ID NO: 528 - DNA, 20 bp, Homo sapiens
acctccttgttcccatggct

SEQ ID NO: 529 - DNA, 20 bp, Homo sapiens
tcccgcaggatgtgctggtc

SEQ ID NO: 530 - DNA, 20 bp, Homo sapiens
agggactgtagcccgtgtaa

SEQ ID NO: 531 - DNA, 20 bp, Homo sapiens
ccagtactctcgaggtggaa

SEQ ID NO: 532 - DNA, 20 bp, Homo sapiens
aattcccacagactcatggt

SEQ ID NO: 533 - DNA, 20 bp, Homo sapiens
cccaccccgagccccttaca

SEQ ID NO: 534 - DNA, 20 bp, Homo sapiens
gtgcatttccttcctggaag

SEQ ID NO: 535 - DNA, 20 bp, Homo sapiens
tcagcggccagctcttgacc

SEQ ID NO: 536 - DNA, 20 bp, Homo sapiens
ggcccggccaaaggcagaga

SEQ ID NO: 537 - DNA, 20 bp, Homo sapiens
acagagcgctgggggcagct

SEQ ID NO: 538 - DNA, 20 bp, Homo sapiens
tcttgattcctcttccagga

SEQ ID NO: 539 - DNA, 20 bp, Homo sapiens
gcaaggacaaaaatggccgg

SEQ ID NO: 540 - DNA, 20 bp, Homo sapiens
cagggcaggcagcctggcca

SEQ ID NO: 541 - DNA, 20 bp, Homo sapiens
atctcggcagccagctgctg

SEQ ID NO: 542 - DNA, 20 bp, Homo sapiens
cccgcaggatgtgctggtct

SEQ ID NO: 543 - DNA, 20 bp, Homo sapiens
ggctccaggttgggagcctt

SEQ ID NO: 544 - DNA, 20 bp, Homo sapiens
caacacggtgctgggtgagc

SEQ ID NO: 545 - DNA, 20 bp, Homo sapiens
gcagccgtgtccctatggta

SEQ ID NO: 546 - DNA, 20 bp, Homo sapiens
tgtccttgcttggggctctg

SEQ ID NO: 547 - DNA, 20 bp, Homo sapiens
tcatggtggggctggcttcc

SEQ ID NO: 548 - DNA, 20 bp, Homo sapiens
gaagctgggctattcatcca

SEQ ID NO: 549 - DNA, 20 bp, Homo sapiens
gaccctcttggcgggaccct

SEQ ID NO: 550 - DNA, 20 bp, Homo sapiens
ggaaaggcagggggcgcggg

SEQ ID NO: 551 - DNA, 20 bp, Homo sapiens
aggtctgtgttagaccctct

SEQ ID NO: 552 - DNA, 20 bp, Homo sapiens
ctcagctccctctagtcccg

SEQ ID NO: 553 - DNA, 20 bp, Homo sapiens
tagggactgtagcccgtgta

SEQ ID NO: 554 - DNA, 20 bp, Homo sapiens
agggggcataaacctgcaga

SEQ ID NO: 555 - DNA, 20 bp, Homo sapiens
ctcccaggattgcctggact

SEQ ID NO: 556 - DNA, 20 bp, Homo sapiens
gggatgaaggtgaaggccgc

SEQ ID NO: 557 - DNA, 20 bp, Homo sapiens
tgcagagcccaggggctggc

SEQ ID NO: 558 - DNA, 20 bp, Homo sapiens
gaatcggcacttgatcccat

SEQ ID NO: 559 - DNA, 20 bp, Homo sapiens
ccgaggctgctccttcctcc

SEQ ID NO: 560 - DNA, 20 bp, Homo sapiens
ccagcttctgcaggacgctg

SEQ ID NO: 561 - DNA, 20 bp, Homo sapiens
gggccggcacgggcccagcc

SEQ ID NO: 562 - DNA, 20 bp, Homo sapiens
tgaggtctggcgctcccgct

SEQ ID NO: 563 - DNA, 20 bp, Homo sapiens
ttggggtgccctgacggctg

SEQ ID NO: 564 - DNA, 20 bp, Homo sapiens
actagagggagctgagggca

SEQ ID NO: 565 - DNA, 20 bp, Homo sapiens
ccagttcccgcaggatgtgc

SEQ ID NO: 566 - DNA, 20 bp, Homo sapiens
tatgccccctgatgacccac

SEQ ID NO: 567 - DNA, 20 bp, Homo sapiens
gtgagaggagagcattggca

SEQ ID NO: 568 - DNA, 20 bp, Homo sapiens
agcttactcactggggtgct

SEQ ID NO: 569 - DNA, 20 bp, Homo sapiens
atcacagcctccaccaggtg

SEQ ID NO: 570 - DNA, 20 bp, Homo sapiens
actgaagtggccagcaccca

SEQ ID NO: 571 - DNA, 20 bp, Homo sapiens
gccggcccagtgggtcatca

SEQ ID NO: 572 - DNA, 20 bp, Homo sapiens
cctgcagaagctgggcgtcc

SEQ ID NO: 573 - DNA, 20 bp, Homo sapiens
gcaccgtgttggtgtctgcc

SEQ ID NO: 574 - DNA, 20 bp, Homo sapiens
ggccctggaactgcagatga

SEQ ID NO: 575 - DNA, 20 bp, Homo sapiens
gtccttgcttggggctctgg

SEQ ID NO: 576 - DNA, 20 bp, Homo sapiens
ctccctggagagccagatgt

SEQ ID NO: 577 - DNA, 20 bp, Homo sapiens
aaattcccacagactcatgg

SEQ ID NO: 578 - DNA, 20 bp, Homo sapiens
tcatctgccacagagcgctg

SEQ ID NO: 579 - DNA, 20 bp, Homo sapiens
agtcggcagggacactgaag

SEQ ID NO: 580 - DNA, 20 bp, Homo sapiens
actctcgaggtggaaaggca

SEQ ID NO: 581 - DNA, 20 bp, Homo sapiens
cccagtgagtaagctgcctg

SEQ ID NO: 582 - DNA, 20 bp, Homo sapiens
agagggtgcaaagaactctc

SEQ ID NO: 583 - DNA, 20 bp, Homo sapiens
cacgatcccgtcagactcgt

SEQ ID NO: 584 - DNA, 20 bp, Homo sapiens
tctgcactgggggctcctga

SEQ ID NO: 585 - DNA, 20 bp, Homo sapiens
cagggggcataaacctgcag

SEQ ID NO: 586 - DNA, 20 bp, Homo sapiens
tgaggacagccacagccgtc

SEQ ID NO: 587 - DNA, 20 bp, Homo sapiens
gtttcccccgcacctggtgg

SEQ ID NO: 588 - DNA, 20 bp, Homo sapiens
ttaggggtgccaccaccccg

SEQ ID NO: 589 - DNA, 20 bp, Homo sapiens
actggggtgctgggacttgt

SEQ ID NO: 590 - DNA, 20 bp, Homo sapiens
ctcactcccgtacgtctccc

SEQ ID NO: 591 - DNA, 20 bp, Homo sapiens
aggggctggcaggagcccgt

SEQ ID NO: 592 - DNA, 20 bp, Homo sapiens
tccttgttcccatggctggg

SEQ ID NO: 593 - DNA, 20 bp, Homo sapiens
gccaaaggcagagaaggctg

SEQ ID NO: 594 - DNA, 20 bp, Homo sapiens
cacgggctcctgccagcccc

SEQ ID NO: 595 - DNA, 20 bp, Homo sapiens
ccacagcgtcctgcagaagc

SEQ ID NO: 596 - DNA, 20 bp, Homo sapiens
acgggctcctgccagcccct

SEQ ID NO: 597 - DNA, 20 bp, Homo sapiens
atgggagcaacgtggccatg

SEQ ID NO: 598 - DNA, 20 bp, Homo sapiens
cccaaggccgggtcaagagc

SEQ ID NO: 599 - DNA, 20 bp, Homo sapiens
aattgctgagaaggggccga

SEQ ID NO: 600 - DNA, 20 bp, Homo sapiens
gggcaggagtgaggagggcc

SEQ ID NO: 601 - DNA, 20 bp, Homo sapiens
ggcgggaccctggggatgcc

SEQ ID NO: 602 - DNA, 20 bp, Homo sapiens
ggggctggcaggagcccgtg

SEQ ID NO: 603 - DNA, 20 bp, Homo sapiens
ttccgacatctggctctcca

SEQ ID NO: 604 - DNA, 20 bp, Homo sapiens
gtgctgcccttgccagccac

SEQ ID NO: 605 - DNA, 20 bp, Homo sapiens
actcctgccgctcgccttgg

SEQ ID NO: 606 - DNA, 20 bp, Homo sapiens
gtggacttcttccggaagct

SEQ ID NO: 607 - DNA, 20 bp, Homo sapiens
ccagtgcagagcccaggggc

SEQ ID NO: 608 - DNA, 20 bp, Homo sapiens
ggggcagtggcagcagcttt

SEQ ID NO: 609 - DNA, 20 bp, Homo sapiens
gggactgtagcccgtgtaag

SEQ ID NO: 610 - DNA, 20 bp, Homo sapiens
ccacagactcatggtggggc

SEQ ID NO: 611 - DNA, 20 bp, Homo sapiens
aacacgggacagccaccgag

SEQ ID NO: 612 - DNA, 20 bp, Homo sapiens
gcaaagaactctctggaggt

SEQ ID NO: 613 - DNA, 20 bp, Homo sapiens
tgggcccgtgccggcccagt

SEQ ID NO: 614 - DNA, 20 bp, Homo sapiens
ctcctgccggggcatcctgc

SEQ ID NO: 615 - DNA, 20 bp, Homo sapiens
aggcagacaggtgagaggaa

SEQ ID NO: 616 - DNA, 20 bp, Homo sapiens
aggcaatcctgggagacgta

SEQ ID NO: 617 - DNA, 20 bp, Homo sapiens
tcagaccagtactctcgagg

SEQ ID NO: 618 - DNA, 20 bp, Homo sapiens
aacatacttgtcattgacga

SEQ ID NO: 619 - DNA, 20 bp, Homo sapiens
ggcagcttggccgctctggg

SEQ ID NO: 620 - DNA, 20 bp, Homo sapiens
gagttctttgcaccctctgc

SEQ ID NO: 621 - DNA, 20 bp, Homo sapiens
gccacaggcagcttactcac

SEQ ID NO: 622 - DNA, 20 bp, Homo sapiens
aggctgcctgccctgcccca

SEQ ID NO: 623 - DNA, 20 bp, Homo sapiens
ccggcccagtgggtcatcag

SEQ ID NO: 624 - DNA, 20 bp, Homo sapiens
ctctcgaggtggaaaggcag

SEQ ID NO: 625 - DNA, 20 bp, Homo sapiens
gattgcctggactcgggcat

SEQ ID NO: 626 - DNA, 20 bp, Homo sapiens
tccttgcttggggctctggg

SEQ ID NO: 627 - DNA, 20 bp, Homo sapiens
gcagagaaggctgcggtggc

SEQ ID NO: 628 - DNA, 20 bp, Homo sapiens
accgtgacctccaaggcgag

SEQ ID NO: 629 - DNA, 20 bp, Homo sapiens
caggacgctgtggatctccg

SEQ ID NO: 630 - DNA, 20 bp, Homo sapiens
aggaagcagccgtgtcccta

SEQ ID NO: 631 - DNA, 20 bp, Homo sapiens
acgcaggaagttgtccaggc

SEQ ID NO: 632 - DNA, 20 bp, Homo sapiens
gaggtccccaagaggaaaac

SEQ ID NO: 633 - DNA, 20 bp, Homo sapiens
cccccagcttcttcccatcc

SEQ ID NO: 634 - DNA, 20 bp, Homo sapiens
attcccacagactcatggtg

SEQ ID NO: 635 - DNA, 20 bp, Homo sapiens
tccaaggcgagcggcaggag

SEQ ID NO: 636 - DNA, 20 bp, Homo sapiens
gctgggagctcagatccata

SEQ ID NO: 637 - DNA, 20 bp, Homo sapiens
tgggggcccaggcatcccca

SEQ ID NO: 638 - DNA, 20 bp, Homo sapiens
gggtgcaaagaactctctgg

SEQ ID NO: 639 - DNA, 20 bp, Homo sapiens
gcgggactagagggagctga

SEQ ID NO: 640 - DNA, 20 bp, Homo sapiens
actggagaagaagaagatcc

SEQ ID NO: 641 - DNA, 20 bp, Homo sapiens
ccagctcttgacccggcctt

SEQ ID NO: 642 - DNA, 20 bp, Homo sapiens
gaactttggggggttcgagg

SEQ ID NO: 643 - DNA, 20 bp, Homo sapiens
gaaaccagttcactgccagc

SEQ ID NO: 644 - DNA, 20 bp, Homo sapiens
acagccgtcagggcacccca

SEQ ID NO: 645 - DNA, 20 bp, Homo sapiens
ccaccccgagccccttacac

SEQ ID NO: 646 - DNA, 20 bp, Homo sapiens
tctcggcagccagctgctgg

SEQ ID NO: 647 - DNA, 20 bp, Homo sapiens
agagagctggactgggatga

SEQ ID NO: 648 - DNA, 20 bp, Homo sapiens
cctttccacctcgagagtac

SEQ ID NO: 649 - DNA, 20 bp, Homo sapiens
aagctggcctacgagtctga

SEQ ID NO: 650 - DNA, 20 bp, Homo sapiens
gtctgtgggagccagtctgt

SEQ ID NO: 651 - DNA, 20 bp, Homo sapiens
agacctatgccccatcaggc

SEQ ID NO: 652 - DNA, 20 bp, Homo sapiens
tgggaagaagctgggggccc

SEQ ID NO: 653 - DNA, 20 bp, Homo sapiens
ctgtggagagaagcctgtcc

SEQ ID NO: 654 - DNA, 20 bp, Homo sapiens
gggacttctaattgctgaga

SEQ ID NO: 655 - DNA, 20 bp, Homo sapiens
ggactcgggcattggctccc

SEQ ID NO: 656 - DNA, 20 bp, Homo sapiens
catctgccacagagcgctgg

SEQ ID NO: 657 - DNA, 20 bp, Homo sapiens
cttctgggagtggaggctcc

SEQ ID NO: 658 - DNA, 20 bp, Homo sapiens
gcccccagtgcagagcccag

SEQ ID NO: 659 - DNA, 20 bp, Homo sapiens
tttgtccttgcttggggctc

SEQ ID NO: 660 - DNA, 20 bp, Homo sapiens
gtggggctggcttccaggac

SEQ ID NO: 661 - DNA, 20 bp, Homo sapiens
tcaagagctggccgctgagg

SEQ ID NO: 662 - DNA, 20 bp, Homo sapiens
cctctagtcccgcggggtgg

SEQ ID NO: 663 - DNA, 20 bp, Homo sapiens
gctcatctgccacagagcgc

SEQ ID NO: 664 - DNA, 20 bp, Homo sapiens
catgagtctgtgggaatttg

SEQ ID NO: 665 - DNA, 20 bp, Homo sapiens
tgcgaggctcctgcctgatg

SEQ ID NO: 666 - DNA, 20 bp, Homo sapiens
ggagtgagtccagcgtctgt

SEQ ID NO: 667 - DNA, 20 bp, Homo sapiens
tgcaaagaactctctggagg

SEQ ID NO: 668 - DNA, 20 bp, Homo sapiens
cacagcgtcctgcagaagct

SEQ ID NO: 669 - DNA, 20 bp, Homo sapiens
cagcttactcactggggtgc

SEQ ID NO: 670 - DNA, 20 bp, Homo sapiens
actgatgtgggtgggggcag

SEQ ID NO: 671 - DNA, 20 bp, Homo sapiens
gcaggatgtgctggtctggg

SEQ ID NO: 672 - DNA, 20 bp, Homo sapiens
tcacagtgtttgtgccatcc

SEQ ID NO: 673 - DNA, 20 bp, Homo sapiens
gtttgtgccatcctggagga

SEQ ID NO: 674 - DNA, 20 bp, Homo sapiens
tcctgaaggactgatgtggg

SEQ ID NO: 675 - DNA, 20 bp, Homo sapiens
tgttagcagagagctggact

SEQ ID NO: 676 - DNA, 20 bp, Homo sapiens
cagtgtttgtgccatcctgg

SEQ ID NO: 677 - DNA, 20 bp, Homo sapiens
agtctgtcagggcctctggg

SEQ ID NO: 678 - DNA, 20 bp, Homo sapiens
tctcgaggtggaaaggcagg

SEQ ID NO: 679 - DNA, 20 bp, Homo sapiens
agactggctcccacagacgc

SEQ ID NO: 680 - DNA, 20 bp, Homo sapiens
agccactcactttggagcac

SEQ ID NO: 681 - DNA, 20 bp, Homo sapiens
tcccaggattgcctggactc

SEQ ID NO: 682 - DNA, 20 bp, Homo sapiens
cctggaactgcagatgaagg

SEQ ID NO: 683 - DNA, 20 bp, Homo sapiens
ggggcgcttcccacagctcc

SEQ ID NO: 684 - DNA, 20 bp, Homo sapiens
cagcccctgggctctgcact

SEQ ID NO: 685 - DNA, 20 bp, Homo sapiens
gcgcgggtgggtagtcggca

SEQ ID NO: 686 - DNA, 20 bp, Homo sapiens
gccccaagcaaggacaaaaa

SEQ ID NO: 687 - DNA, 20 bp, Homo sapiens
agcctggatgggaagaagct

SEQ ID NO: 688 - DNA, 20 bp, Homo sapiens
cagctcttgacccggccttg

SEQ ID NO: 689 - DNA, 20 bp, Homo sapiens
taggggtgccaccaccccgc

SEQ ID NO: 690 - DNA, 20 bp, Homo sapiens
tccactcccagaagaggaaa

SEQ ID NO: 691 - DNA, 20 bp, Homo sapiens
ggaagcgcttcatcgaggag

SEQ ID NO: 692 - DNA, 20 bp, Homo sapiens
gcatcctgctggcagtgaac

SEQ ID NO: 693 - DNA, 20 bp, Homo sapiens
tggatgaatagcccagcttc

SEQ ID NO: 694 - DNA, 20 bp, Homo sapiens
acacgggacagccaccgagc

SEQ ID NO: 695 - DNA, 20 bp, Homo sapiens
gggctcctgaaggactgatg

SEQ ID NO: 696 - DNA, 20 bp, Homo sapiens
cagcctggatgggaagaagc

SEQ ID NO: 697 - DNA, 20 bp, Homo sapiens
ttttcctcttctgggagtgg

SEQ ID NO: 698 - DNA, 20 bp, Homo sapiens
ctccaggttgggagccttag

SEQ ID NO: 699 - DNA, 20 bp, Homo sapiens
gggagctgagggcaggggtc

SEQ ID NO: 700 - DNA, 20 bp, Homo sapiens
agatgaaggtggacttcttc

SEQ ID NO: 701 - DNA, 20 bp, Homo sapiens
tttggccgggccatgggtgc

SEQ ID NO: 702 - DNA, 20 bp, Homo sapiens
ctcgcacctagcgggggcag

SEQ ID NO: 703 - DNA, 20 bp, Homo sapiens
cccgtgtaaggggctcgggg

SEQ ID NO: 704 - DNA, 20 bp, Homo sapiens
tgccggcccagtgggtcatc

SEQ ID NO: 705 - DNA, 20 bp, Homo sapiens
aaaggcagagaaggctgcgg

SEQ ID NO: 706 - DNA, 20 bp, Homo sapiens
aggagcccgtggggcagggc

SEQ ID NO: 707 - DNA, 20 bp, Homo sapiens
taaggggctcggggtgggcc

SEQ ID NO: 708 - DNA, 20 bp, Homo sapiens
acaccatcacgacgcgtggg

SEQ ID NO: 709 - DNA, 20 bp, Homo sapiens
ctggcaggagcccgtggggc

SEQ ID NO: 710 - DNA, 20 bp, Homo sapiens
ccggccttggggtgccctga

SEQ ID NO: 711 - DNA, 20 bp, Homo sapiens
ctgtgttagaccctcttggc

SEQ ID NO: 712 - DNA, 20 bp, Homo sapiens
gtgatgggcacgtcgggccg

SEQ ID NO: 713 - DNA, 20 bp, Homo sapiens
gcccctgggctctgcactgg

SEQ ID NO: 714 - DNA, 20 bp, Homo sapiens
ctgggtgagctggtgaaaca

SEQ ID NO: 715 - DNA, 20 bp, Homo sapiens
ggctgctccttcctccagga

SEQ ID NO: 716 - DNA, 20 bp, Homo sapiens
acagcctccaccaggtgcgg

SEQ ID NO: 717 - DNA, 20 bp, Homo sapiens
tgcccgagtccaggcaatcc

SEQ ID NO: 718 - DNA, 20 bp, Homo sapiens
aggtggaaaggcagggggcg

SEQ ID NO: 719 - DNA, 20 bp, Homo sapiens
cgacagattcattgtgaagc

SEQ ID NO: 720 - DNA, 20 bp, Homo sapiens
gcggggtggtggcaccccta

SEQ ID NO: 721 - DNA, 20 bp, Homo sapiens
ggcaatcctgggagacgtac

SEQ ID NO: 722 - DNA, 20 bp, Homo sapiens
gccgctcgccttggaggtca

SEQ ID NO: 723 - DNA, 20 bp, Homo sapiens
tcactgccagcaggatgccc

SEQ ID NO: 724 - DNA, 20 bp, Homo sapiens
cctgaaggactgatgtgggt

SEQ ID NO: 725 - DNA, 20 bp, Homo sapiens
gtgcgaggctcctgcctgat

SEQ ID NO: 726 - DNA, 20 bp, Homo sapiens
gcacctggtggaggctgtga

SEQ ID NO: 727 - DNA, 20 bp, Homo sapiens
tcacagcctccaccaggtgc

SEQ ID NO: 728 - DNA, 20 bp, Homo sapiens
gccgctctgggtggaagaat

SEQ ID NO: 729 - DNA, 20 bp, Homo sapiens
gactagagggagctgagggc

SEQ ID NO: 730 - DNA, 20 bp, Homo sapiens
tcagctccctctagtcccgc

SEQ ID NO: 731 - DNA, 20 bp, Homo sapiens
ggagcctccactcccagaag

SEQ ID NO: 732 - DNA, 20 bp, Homo sapiens
agaccctcttggcgggaccc

SEQ ID NO: 733 - DNA, 20 bp, Homo sapiens
ccaccttcatctgcagttcc

SEQ ID NO: 734 - DNA, 20 bp, Homo sapiens
gggagtggaggctccaggtt

SEQ ID NO: 735 - DNA, 20 bp, Homo sapiens
cagtgaactggtttctggag

SEQ ID NO: 736 - DNA, 20 bp, Homo sapiens
tcacctgtgatgggcacgtc

SEQ ID NO: 737 - DNA, 20 bp, Homo sapiens
tgccagcaggatgccccggc

SEQ ID NO: 738 - DNA, 20 bp, Homo sapiens
accctcttggcgggaccctg

SEQ ID NO: 739 - DNA, 20 bp, Homo sapiens
tgggggcagcttggccgctc

SEQ ID NO: 740 - DNA, 20 bp, Homo sapiens
aggaggaggccctggtgagc

SEQ ID NO: 741 - DNA, 20 bp, Homo sapiens
ctggaggtgggagccatgca

SEQ ID NO: 742 - DNA, 20 bp, Homo sapiens
tctggaggtgggagccatgc

SEQ ID NO: 743 - DNA, 20 bp, Homo sapiens
cctggatgggaagaagctgg

SEQ ID NO: 744 - DNA, 20 bp, Homo sapiens
ccagcccctgggctctgcac

SEQ ID NO: 745 - DNA, 20 bp, Homo sapiens
ggagtggaagcgcttcatcg

SEQ ID NO: 746 - DNA, 20 bp, Homo sapiens
tgtagcccgtgtaaggggct

SEQ ID NO: 747 - DNA, 20 bp, Homo sapiens
ggagtgaggagggccgggga

SEQ ID NO: 748 - DNA, 20 bp, Homo sapiens
gaggtcacggtatgtgtcgt

SEQ ID NO: 749 - DNA, 20 bp, Homo sapiens
ctagagggagctgagggcag

SEQ ID NO: 750 - DNA, 20 bp, Homo sapiens
tggtgtgtttcccccgcacc

SEQ ID NO: 751 - DNA, 20 bp, Homo sapiens
ctgatgtgggtgggggcagt

SEQ ID NO: 752 - DNA, 20 bp, Homo sapiens
agggccggggagggcaggct

SEQ ID NO: 753 - DNA, 20 bp, Homo sapiens
tgagctatgagtggcccctg

SEQ ID NO: 754 - DNA, 20 bp, Homo sapiens
tcttacgcaggaagttgtcc

SEQ ID NO: 755 - DNA, 20 bp, Homo sapiens
gttccgacatctggctctcc

SEQ ID NO: 756 - DNA, 20 bp, Homo sapiens
agggggcgcgggtgggtagt

SEQ ID NO: 757 - DNA, 20 bp, Homo sapiens
cgctggcctgctccttggcc

SEQ ID NO: 758 - DNA, 20 bp, Homo sapiens
gaaaggcagggggcgcgggt

SEQ ID NO: 759 - DNA, 20 bp, Homo sapiens
tagcccgtgtaaggggctcg

SEQ ID NO: 760 - DNA, 20 bp, Homo sapiens
ctgagggcaggggtccggtg

SEQ ID NO: 761 - DNA, 20 bp, Homo sapiens
acacagcttagtatacacgc

SEQ ID NO: 762 - DNA, 20 bp, Homo sapiens
ccgtcagggcaccccaaggc

SEQ ID NO: 763 - DNA, 20 bp, Homo sapiens
ggcaggggtccggtgaggtc

SEQ ID NO: 764 - DNA, 20 bp, Homo sapiens
ggacttgtaggagaggatct

SEQ ID NO: 765 - DNA, 20 bp, Homo sapiens
tcccagccatgggaacaagg

SEQ ID NO: 766 - DNA, 20 bp, Homo sapiens
gacttctaattgctgagaag

SEQ ID NO: 767 - DNA, 20 bp, Homo sapiens
ggctcctgaaggactgatgt

SEQ ID NO: 768 - DNA, 20 bp, Homo sapiens
tggcaggagcccgtggggca

SEQ ID NO: 769 - DNA, 20 bp, Homo sapiens
agacaggtgagaggaagggc

SEQ ID NO: 770 - DNA, 20 bp, Homo sapiens
tcggaactttggggggttcg

SEQ ID NO: 771 - DNA, 20 bp, Homo sapiens
gcctggatgggaagaagctg

SEQ ID NO: 772 - DNA, 20 bp, Homo sapiens
tgaaggactgatgtgggtgg

SEQ ID NO: 773 - DNA, 20 bp, Homo sapiens
ctgggggcccaggcatcccc

SEQ ID NO: 774 - DNA, 20 bp, Homo sapiens
gagcccccagtgcagagccc

SEQ ID NO: 775 - DNA, 20 bp, Homo sapiens
ggcgcgggtgggtagtcggc

SEQ ID NO: 776 - DNA, 20 bp, Homo sapiens
ccgtgtaaggggctcggggt

SEQ ID NO: 777 - DNA, 20 bp, Homo sapiens
gtcgtgatggtgtgaacacc

SEQ ID NO: 778 - DNA, 20 bp, Homo sapiens
acgacgcgtgggtggcaagc

SEQ ID NO: 779 - DNA, 20 bp, Homo sapiens
gggggcagtggcagcagctt

SEQ ID NO: 780 - DNA, 20 bp, Homo sapiens
agcgtgtatactaagctgtg

SEQ ID NO: 781 - DNA, 20 bp, Homo sapiens
gctcctgcctgatggggcat

SEQ ID NO: 782 - DNA, 20 bp, Homo sapiens
gtctgtcagggcctctggga

SEQ ID NO: 783 - DNA, 20 bp, Homo sapiens
gtagcccgtgtaaggggctc

SEQ ID NO: 784 - DNA, 20 bp, Homo sapiens
agcccctgggctctgcactg

SEQ ID NO: 785 - DNA, 20 bp, Homo sapiens
gtgaactggtttctggagcg

SEQ ID NO: 786 - DNA, 20 bp, Homo sapiens
ctacgagtctgacgggatcg

SEQ ID NO: 787 - DNA, 20 bp, Homo sapiens
agtgaactggtttctggagc

SEQ ID NO: 788 - DNA, 20 bp, Homo sapiens
acgcgtgggtggcaagcggg

SEQ ID NO: 789 - DNA, 20 bp, Homo sapiens
cgcgggactagagggagctg

SEQ ID NO: 790 - DNA, 20 bp, Homo sapiens
ggcaggagtgaggagggccg

SEQ ID NO: 791 - DNA, 20 bp, Homo sapiens
aagtgagtggcttcttacgc

SEQ ID NO: 792 - DNA, 20 bp, Homo sapiens
ctgaaggactgatgtgggtg

SEQ ID NO: 793 - DNA, 20 bp, Homo sapiens
ttgccacccacgcgtcgtga

SEQ ID NO: 794 - DNA, 20 bp, Homo sapiens
agggcaggagtgaggagggc

SEQ ID NO: 795 - DNA, 20 bp, Homo sapiens
tcttcttctccagttcccgc

SEQ ID NO: 796 - DNA, 20 bp, Homo sapiens
aggagtgaggagggccgggg

SEQ ID NO: 797 - DNA, 20 bp, Homo sapiens
actcccagaagaggaaaagg

SEQ ID NO: 798 - DNA, 20 bp, Homo sapiens
tgaggagggccggggagggc

SEQ ID NO: 799 - DNA, 20 bp, Homo sapiens
acctggtggaggctgtgatg

SEQ ID NO: 800 - DNA, 20 bp, Homo sapiens
cagggccgaggcctcctcag

SEQ ID NO: 801 - DNA, 20 bp, Homo sapiens
tactctcgaggtggaaaggc

SEQ ID NO: 802 - DNA, 20 bp, Homo sapiens
ttggggctctggggggtgag

SEQ ID NO: 803 - DNA, 20 bp, Homo sapiens
gctcctggacccccagcagc

SEQ ID NO: 804 - DNA, 20 bp, Homo sapiens
ggggggtgagaggagagcat

SEQ ID NO: 805 - DNA, 20 bp, Homo sapiens
cggcccagtgggtcatcagg

SEQ ID NO: 806 - DNA, 20 bp, Homo sapiens
aggaagggcaggagtgagga

SEQ ID NO: 807 - DNA, 20 bp, Homo sapiens
gagggccggggagggcaggc

SEQ ID NO: 808 - DNA, 20 bp, Homo sapiens
tgctgggggtccaggagctg

SEQ ID NO: 809 - DNA, 20 bp, Homo sapiens
gctgggggtccaggagctgt

SEQ ID NO: 810 - DNA, 20 bp, Homo sapiens
tgagaggaagggcaggagtg

SEQ ID NO: 811 - DNA, 20 bp, Homo sapiens
tgggagtggaggctccaggt

SEQ ID NO: 812 - DNA, 20 bp, Homo sapiens
gaggaagggcaggagtgagg

SEQ ID NO: 813 - protein, 446 aa, Artificial Sequence; identical to SEQ ID NO: 266
  KSQ CAR1909

SEQ ID NO: 814 - DNA, 1338 bp, Artificial Sequence; identical to SEQ ID NO: 267
  KSQ CAR1909

SEQ ID NO: 815 - protein, 8 aa, Human
SLLMWITQ

SEQ ID NO: 816 - protein, 142 aa, Human; identical to SEQ ID NO: 260

SEQ ID NO: 817 - protein, 178 aa, Human; identical to SEQ ID NO: 262

SEQ ID NO: 818 - protein, 274 aa, Artificial Sequence; identical to SEQ ID NO: 252
  95L TCRa

SEQ ID NO: 819 - protein, 311 aa, Artificial Sequence; identical to SEQ ID NO: 248
  95L TCRb

SEQ ID NO: 820 - protein, 22 aa, Artificial Sequence
  P2A linker sequence
GSGATNFSLLKQAGDVEENPGP

SEQ ID NO: 821 - protein, 607 aa, Artificial Sequence; identical to SEQ ID NO: 253
  95L IG4 TCR

SEQ ID NO: 822 - DNA, 20 bp, Homo sapiens
caggacgctgtggatctccg

SEQ ID NO: 823 - DNA, 214092 bp, Homo sapiens
gctgtcctgggtagaagggtttggcagccctagggagatgaatttctccagcgttggacccgcccagagcggagaagcaacacccttccagccactactctgttgctatgaaacaaaagactaggaaggtaagcgaagcaggaagtcccgcctttcagccccagatggctttggctcccggtcccgacgctcacgcccacctgccaccccttattggttagctccttcgtgccttgcatcccttcgtccatttcctttcccgtttccactttcgttcccgggagagtccaggcccctcatttctctccgagtccaattcctttctgacgtgctgcgagcgggccttcctctggggccattgtgtactgtggaggacgtggacggggcggcagcgcgaggaggacgggcgcctcccgtccattggctgcacccgctgtcgggcagtgcgcggttgcgcggcattggctcagcggcgcccggccccgcccccgccccgccccgccccgagcctgggtcctgtgtgtgccacaggggtggggtgtccagcgagcggtctcctcctcctgctagtgctgctgcggcgtcccgcggcctccccgagtcgggcgggaggggagagcgggtgtggatttgtcttgacggtaattgttgcgtttccacgtctcggaggcctgcgcgctgggttgctccttcttcgggagcgagctgttctcagcgatcccactcccagccggggctccccacacacactgggctgcgtgcgtgtggagtgggacccgcgcacacgcgtgtctctggacagctacggcgccgaaaggcaagaagggaaggggtcgccggggaggctccacacttcttgccggcccgggggcccggggtagccaggcgcgggccaaggaggaagaggggacagccctggctctcagctgcctttgccgccgccgtccagtttgaagtggggcatttaaagaccagaacccgcaggccggggaggagggagagggcgtccaggcagacggcggtgaggactgcagcaggcggccgggaggcgcgtccacccaggcgccgagcccacagtgtccctcccgcgccctagacggacggtgctgcgggcacgggagggacactttgtcccctcccagtccaccttcctcctgcagctcagacccgaggggccgggaaggggcctgagcagggaagggacacaggcgtcctgaaacaaagctttgggttgagggcagaggcgaggagccagagaagtgaactcctcctttccgtggccgctcttgtcatttttctcttttctcttttcaaatgggctatttgtgtgttaatttcatttggttcttgggaataacgactcaccgcgttgatttaaagaaaggtgttcgtgtgtccgtacttggtggttttagtgtgggacatgccctgcgcttttgttgacaacagagctgtcccttacgtttgtgtaggataatctttatgtttatgtaacttggagaaatctaacagagtgaaagtgaagtttctgcgtaaggctcccaaaatgtatgataggaccttcagttgttctggtattttgaattggaattaaggcaggaggggaagaacattctgtttttatctaggtgggggaaacctgtttaagttttgtttgttcttttttttttttttatgagttgagtattagttcagccttagctacttgaaacgtgagcaggatgcatctttaactcttagtattgtaaaagcaaatctaggatcactgctcttaaaactactgtgtgtaaagattgagagtgtaaattcacaagcttattgataaagatgaatccggaacttttggttttgctctaatcgatggaggaagatgcagtggtacaagttagtctctagttttctggtgggtaaatattttcaaaaccaactaacttttctttttttaaatctgccttttaaagaactaaaattccagatggcaaactcaatgaatggcagaaaccctggtggtcgaggaggaaatccccgaaaaggtcgaattttgggtattattgatgctattcaggatgcagttggaccccctaagcaagctgccgcagatcgcaggaccgtggagaagacttggaagctcatggacaaagtggtaagttctgtctgacgttgcctgtgcgaaacactattcactttgtctgtggtttctccagatttatttatactgttaattaataccaaccattgttatggcaacaatcttttgatttcaattcatcatttttcttcaactctgtgttttttgaaaagttggattcaaagacttttttgttttttaacctttcatcctttctactctttaaggttcagagttcctctacatgactcagtatgtaaagttttaccattggctgctttttgttggtgtatggccatagaatgcttggaagtgtttgttctgtcttctgtgaggttgtgttgctcttagataacaaaagagtaccagcaggttatttaagtctttgaccactcatgacaatcatctggtatgatactgaaaatatttactggggaaagaaacagattagttcttaagtgaagaagcagtagttgagggagtttccattttcatctttgagaattcatcttcattaagaaactttttttgttgttaatgggagagttaacagtttctttcatctactattccattttgaaacaggaaacctttcgatggcacattgtttattgtgaaaggaaaatttatgttgggggtggtgaggctgagagtatcagaaacctctgtggtttctgcatgttgctttcagacaaactataatttcacaagaagaaatcatgatgggtgtcagtatccagagaagtcaatctgaataccttacagagatttactcagaaactgtagctgtcagtatcctaccttactaagtatgattataaaataaatttaagatgtagcttgctgctttgcaaaaattaataattcttttttttgaagcagtagcactgtcctggatttattagtaaatgtttggaacacattatgactttatttcatagatatctggggccaattataagtttagttgaggcaagactcagtatctttataactgaagaaatggaggttttaaaaacaaatttctgtgtaaggatgtgccaaagcatccatgaaatcatgtgataacattcatctttgctttgatttgctcctgtctgtaaatattggctataaaagccactatcagtagtagtagcaacatatgaatgtgacaagatttccattattttcatttattctgatggaagggacacacagatgaatgactggcctgtcattctacaggcaatggtgctaaatgcagagccagaatatttttgccagataaatagccttagttttgggcttcagtgtgacctatttacgcttctgccaatttattcaaattgttatattaaagtgctccagacagaatgatgtcatagtgtcagaatattgcaacttgctgcttggggttcagttttgattttagcattggatactttagaataaggactattcaattggaaaaatagcatatatttgtcaagcacaatgctgcctatcttgtctttgctaaagagtgtgcatttgaaggtcactctcactgcctaaatcattagttggggtaagagaaggaattcaaggtttttctctaacttatctgctacgtaagtggacagcaaatggttcagattctataaaggggctgttctttttcccccaccctccaactttgagtggtcagtgtttgtacatttgtgttaggacatcaaatcaaaaagatttatataaggatgtggtgagctatagttactataaaatcattatttttgaaacattaaaaatgatgtacacaattttggtctgtaactggttgttaacataagttttattcacttttaattatttcaccatgagttatggtaaaatagatggttatttgatagttaaacatctgctattgtttattttattaacccttctgtgggtttaggtttagtctctccaattgagaaacttgacccaacaaggaaatctattatcaaaagtctctacttagtgggatgtgggtgcgggtgttggcaaatgtacattgcctgtttgtcttcattatttgtcaaagatgaaaatggttgtgttcatttgtgaatgtacccaggggctttgtggagagaaattgcataaattattatgaaagaattcagtatgtttatttttactgtaagatacagtaaatagaaaggcattgataattactaattggcagtatataagtgtgtagtacagaaacatccccctcttttgtttatcttttcttatttgttagtggtgaaggaagtggctcataatatcaacattgtcctgatgattacatcaggaactttattattagttctgaagttaatcccttgacacattacctttttaaaaaaataactgcaatagcatgaatttagtttgtgaataacagaaaatagcaattttcaagtctaattggtaggtatgtaaaaggcagagttaagtgtatagttaatatttttttcttatgaagcctctttgcaagggtagatcttggaagtataaatatgaacacaagcttcaatttcagtgtgtttcagctaccaataaagtaaaataactatttttacagggaataatgaagcagtcttgggttgtaggggaaatatctagtgagtatgtagttttaccatttcttggcctctggaatttaaaatggtcaattgaaattctttccaattaatgttctgttttcagagggcaggcttttgctctaaggtcactgagaataggagagcgtaattgctcagttgtgttccttataagatgtagagtgttttgtaacagaaaatcagtagcacagagttagcatagtctatgttttgaggaaaagaatagtagatagtagcatatcccaaaacatcccattacagattttctggccttagctctgtgtatgtgtaatttgatagccgacccagaagccctcacatcagtggatgcttatttgatacagtgatagaagtattaatcatgaatacatatctaggttcaagtgcgccagaatgaaatgtggagtctgttctgaagctactcaagagacaaggtttcttaaacacttaataaacattttttgagggcctactgtgtttccactgagtgctcgttactggggatatgaagctagacaagacataatcccgcctttgacctgtcaaggaactcagagaacagtatcagagccaaacacataaatggataattgccatgtagtatggaaagggctatattacaaaccccaagtacagtgggaacagagtagagaacatcctccttgtttttctggccagtgttgagacagttttctgtctggattctgctggccattgccttttaggaacagcattattgtgttcttgttggaaatgctgaggtgagagtaaggaaatgattactaatcagtatggttggaatgataatttattaatgtgaggttcctgagcatggttttcataagaatcttagccaggtgatggaaaatagaagaaacaattttccatctaatagatactaaatgtactgagcatacatggatgcttaggaaattagaaaataattaattgatgctgaagagcaaagcactctgagtacctgcctcaaatttttgttttgctgtcctcgtcatttattttaaattacattaccaaaagaatttaaaaagcatttaggaagtgatgatgcccagtaggcttttcctgccttttgccctcagtctatttagtacatttttcaagcttgaaatataatttacactccttttaatttaattgtgatcataatatattttaaagtttgtcaatcaaggatgcttggattatatataaatattttaaagaatacaagtcaactttcttttctaagctgagttcctcatatctctgaaagatattccatgtggactaagacaggttttagatgcctgttgtttgtgtttactaagttggagactcttacattcctagagccttaaaaccagggatatcattcatttgaattatacttcttgacgtatttccttttcctcactgaagttgttccaccttagcagaatcatgggttgtggtagacttggttaggggataataacaaattgtctggacagttttgtttagtactcagttcagttttgaatttgtgttgtgataaatgaagtgatcccaaagtttggtacatgacttcttagaaaagctattgataaagtgaaagatttaaaggaatcatatgaagacttaccttggtttatccctgtgatataaggcattcatataatgcaggccttaatcagttagtagtcttttaaatattacagaatttttagcattgagattttgaatctatttctttcttctttttagaaggtgctttatgtgctatctgttgatttcatcattcatttatcaaatctcaactatggaaagacagacatttccaaatagctatgccatagagtaaaatgtagtaagtgctttaaggtagtataaataaagtgctgagatgtagtacgtggtagaggtgaaccgttgcttgctaagggtgaaaagttggtgtagaatgaagcatggaggaggtgctggccagctcatgggttggagtccagtgagatggaggacatgttaggttgaaggaatgatagattgttgagtaagagaggggaagttagggtaagatgatagaggttttgattgcttttgtcaaataattttgtcttaatttatttggtagaaaaccattgaaggctgttaatcagggagggaaaacttcagggctgtgctttgatagaatacttacttgactctgtaaagcttgaattaagagaaaaaaactgaaagcaagagtaatgatcaagaggaattaaaacagtctgggcaagaaataatgaaatgctggcctagatacttggaagtaggtgtagcaagtgttggttcagatgtgggaggcattttggaggtaaaatctacaggtcttggtgaccccttagaattagaggatgaaagagaaggtgcagtgaaagtgactcttgaggttttcagcctagttgactccgaaggcagtgatgcacttaatgaggtaaggaacgtaagaaggaaaagaggaagtgtgcgggttagtttttggccatgctaagttcagtgtaccagagtgaatttcatttaaaatcagaaaattaagtgtacagttcaagagagaagtagaaacaagagacacatatttggtagatattctcatagagatagcatttcaagctatataactgtcagagatttcggaggaagaatagagggagcaatgcagagaaaaagtcagataattgaattctggggagattgaggggtgtaattaaataccagagaaggaaagagaatcctacatagattagtgatgagaaaggtagaattaaaccataatgacatcctaggtacaaacagctttaagaagaagataaaatctgaagttctgataaaactaagttcagattcaagtagagaaaaccaaacagggtgaaaaattaagaagtcattgaattgtatgattagaggccattattgacctttgtggagcagtttaacttatgtgatggggtgagattaaaatgagtatgtggattatttaaaaattgttctagaactgtaacaacaatgaaaaggaagggagttctgttagcttgaggatttgaacatcattgaaataactctgtgtgtgtgtgtgtgtatgtatgtgtgtgtgtgtgtgtgtgtgtatgtgtgcacacaccataggagaggttcaaagattggtgggaaaaaaaaaagattgatgggaaaggatgtagttagggaatggcctaagatgcaagggaaaaagaaatagttgaagcagtagcattctagattaaactgtgggagggaaagagtaggaacaagtagaagggttaatcttggcgaataaatgtaacttccacttacacaggaggaaagcaagggaatatacagagaagttttgagggaatttgtaaattttatattgggttgtcaggaagtgatttaaggcataatatttataatgtttaaaccatgtttttaatttttatatcatgaaatatgcaatatatgtattttaactagtcttctagcatttaagtgggtaaataagtaaaaaattaaaatggaaatcaattctcatctttaatattaagtttatcttattatacacttgctgtgacttagaggatgccacagtgctatttttatctactctgcttgggcatatattaataatattattacaattttactaaaggttttttttgtttttaagtatttgtaggttgctaatttttttcaagtaatgaaagacacattttgaaaatatccaacacattttataggtttttaacatagttacatttagatgattgttgagcttatattatcttacagtatcaatgaaaaaagtattaatagttataatattctacctgttaaaagatttaaaaaaatattaaagccctacgtcttttcctgagagcctcttgggtttgaagaaaccagaggattccatgtcagctgacaggaacactgacctgggcttagccttatttcctgcttttctgcacagaacattccaggctttttaagggttttaggcagcatgagtaactttatgagctaaaagagcttctaaaaatcatgatcctcaacaaactgttcagtgcccttggtctaattttcatacctttgcaaaatctgcagggattttgccttgtgatggaatgtaaaatatggaagggagaagaaatattaagaaggagatagggctaactatgttctggacacagtgcatagcactttacatttcctcttgtaagaattataatatcctaagaggtttcccgaagaagaaccctgcccaaggttgtaaagctagtaaatgttagggccagatcctaggtttgcttgattctaatgtctgtgttcacagtatgaagagtgaagcacactgctccatggaataatatgatgcttcctttttccaaaggaagtaaatcaaaagggcatttcccctcctccacttccatatttgatattatcaaattcttctccaaactttgtactcatttttaggcagctttattcaatgtagttgtggatatgctatttgtaatataattttcctgagaggttcgtccttaccttgtttgcttcctcctcctcttcctcctttctgccatcaaatatttgttgcacatctactatatgcaaagttccatattaggtgatagagagagaccaatgagaaagactgttcttcactttcaaggaagttccattctcatttggaagaaagagagtgaacagaatacacaattgatattttaattacaactagtcagttctttaatggtgcttcttaatgtcaatcttctgaagacatcttcgtggaaaaccataaaggtcttggtaattttctgtaaattcagctgtgctggactcatgatcaattttatatgccaactttgttttgcccaattaataatctattaaaaaagtgtatttttatacttttttacactgtacatttttatacttagtaaaatacatttttataatttttatatttagtaattatttgctgcattaaaatggaaagaacccaaagaactcttcggtacctgttattataaagagagagatatatatatactttaggtcactgtaataagaaacctcttctaacatttataggaggaggacagggctttcttttttttttttttttttttgacacggagtctcactctgtggcccaggttggagtgctggagtgcagtggcacgatctcggctcactgcaagctccgtctcctgggttcacgccattctcctgcctcagcctcccaagttcctgggactacaggcgcctgccaccacaccctgctaattttgtttttgtatttttagtagaaacagggtttcaccgtgttagccaagatgttctcgatctcctgacctcgtgatccgctcgcctcggcctcccaaagtgctgggattacaggcgtgagccaccgcgcctagcccagggctttctatattgtttttaagaatgaggcagttcacttgagagtatatgacttgattcagtgtaactgaatgctccatgaagtgaggcgtgttttataatgaaagtcttatagtataggcacaattccttactgttgaaattttcattttatttggtaagagttctttcctatgtttcacaggctggtttgaaccttgtttgcaaggaatgtactatctgatctaatacatttttattaccttttggctggaagttttaattaaggcgcagtcagaaaactctttaaatgcaagattattccaagaataagtaatgactttgaaaattcttatagcattagtaaatcctgtttttgtatttgtgcttttgctttgatatggttgaatatatgtatctaaatacatatttatgtattggaatgcatagccaatatattaataatatatttttattcatgtgaaacaatgcatgtacagagagagtctccttaaatatttctaatacatttaagcaaatacaaaactcagttgtatattggtatggagacagttcctgattctcaagtccagctatcagggttctgagcagtaaccttagttaggttctagttctgtatttcaatattgacacgtcaaaaggaattggtcctggtaatttccaaattttttgagtcaatggctatagtggaattttcagcctaattccaataataaatgttttgccttttagttcaacagaaaagagcaatattgctattgaaccaattcttttatgcaccaatcggtgccctacaaagttcatcattttataatgtgactacagatttgttctttgtcaaagctcttctgtgttagtaccaagcttcattctaggaagcaatttaggtatttctagaagaggtgtaaccatttgaatctgaacttgaccctggtggtgagcttgattttctctctaatatactgcctttagaaaagcaatttttctttcctggcttttgcagctccttgcacatagcaggtattcaataaatatttattgaatggaattgaatttgacctgcttagaagtcatagtcctgatgtagggttattcatttttggcagaagctgtcataaatcacagggtttaatagtaatccaactgatgaactgcgcacccagtggcataccgtagttcagcattgtatgttgcactttcccaagtgcaaatttagaaaacagtttagcctacagggccttgatgaactgactctggcctatttcagatctctcgtactactcactcacagccttccttcctatgctctgatcttttagaataactgcatttacttctctcttaacatgcttgctctctggtgtctcttaagccttagcacactcctttgcctagaatactccttttggcaaatttaagtatgtatttcctgacactcttatgtggagatgagtgagctgctgcttttctcctgtagcagtttgtacttgcctccatcatagcactaaattctcctgtaattcttttcctaagccaccagtctttcccactaggcagctgcttgagggcaggtgtgtgatttattcctttctgtgttccctagagcctgaaacaatgcctgccacataaatgtttgttgaattaacaaatgggtcctgaagtttacgtaaatttgcaaatggaataaaataaaaatgtaaatgagtttagcagggatcattaattatatgcctaattttaattaaattgtgatacagttagaaagatcagcccgagattcagaagatacaagctcttgtattggattaatgatattttaatggtcccttaatctttctagttcttagtttttttaaatctggaaatgaatggattgggtggaatctttactaagatcccttagagcaagaattacattgctcttaagttaattatagagaactacgtctcttctgccagactctttgcatctctttgaatcaggaagtatgttctagtcatctataatttcctagctctaagctcagtacctggcatatagtagttcaagcaatttccacctgataaagcaataaattcccacatggaattacagttttaaataaagcaaatgagaaaaaagttcagataaagaatagtgaattaaatatttgtaaaacataaacgtttctgtcaaagaatatttatgtggaatgtctggaaaaaaaatacctgacagaaattttgtatgtatcagttaaaaagttctctagtagaggaaatgaatttgaagctacctggtccccaaactagaagaaaataatgtatcagtctgtgacatgttacaccaagttttatgttgctgacattaaactatgcctgctgtagaatgttggtggcaatattcttggtatttatgtatacttgtgatagtatttttggtttaaataatttaaaaaccatattctttttcaagcaggatttgttaaataattggcatatttgggacttaatctttagggcagaatgaactctgattatactaacgtatcacgtattaaaaagggggtaaaaaaagctctgtcagccattttcactatactttgtaaagatttgctgttatttagtaaatgagatgacatcttacctttccaaggactttcttggagataaaaatactattattactttttaactaagcctatacctttggattattaatttgaatacttgatactttagagttcaattgtaaaaataaaggaaataatacaatcaaactatttgtgaaaaaaaaatagcagtcaaccaatccattaatttgttggttatgtactcagcaattctgctttaaggcattgtttacaaagaggaagaatataagatcatgccctgggttaatgtgaaaaacatcttaaattagaggctgatggttggaaatttgaaccagatttttctctccatctactccctctgaaaaaaaccctgatccccagtgatttcttttttttttccttttcttttttttttttttttttttgagatggagtcttgctttcttgtccaggctgagtgcagtgatgtgatctcagctcactgcaacctctgcctcccgggttcaagtgattctcctgcctcagcctccttagtagctgggattacaggcacctgccaccacacccagctactttttgtatttttagtagagacagggtttcaccatgttggccaggctggtctcgaactcctgacctcatgatctgcctgtctcggcctcccaaagtgctggggttacaggtgtgagccactgcgcctggccaatttctttaagaaagtaagtgtgatagtgtgtataagagtaccctttaaatttgttagttccttgatttattgtgttcgttatgcttgaagttattatagttcgattgtttatttgtcccaggcacttttatgggtgcccagaggcagatccatgttttatgtcccctgaaacttatatgatttgaaagaatctttctaaatataaagaatacgaaagtacaaacatcaaattgtttatgaaagtgaattttttttagaatgagaaaaatccacaaagcactatagtttttaaaaagccggtatatctacaagtgattagagaaataatctagactagtttttggctctgtacattttatactttgattatcttccgttaccgcatatacttccagttttgggtgtcatgaaacacattcaaattgccagatttgaattggatttcactgttcccatggtaggctagtcagcattgtgggcacctcaggtatttctaaaaccatcttttaaaaaaagttctattacagatttaaaaaatattgtatttatttaaggtgtataacatgatgctttgatatatatacacatagtgaaatggttactacatcaaataaattaacatatccttcaccttccataattacctttctgtggtaagaccatttaaactctgttctcttagcaaattttcagaatacagtattattagctataggcctcatgctgtacattagatctccagtattaattatcctacataacttcaaatttgtactctttgaccttcttctctccatttcttcccctccccatccctggggcccacccactgttctactctctgtttctttgttgcttaactccttcttttaagattttgcatgtgaaaatgagatcatatattaatagtatattctttctttgcctgccttatttcagtttcattgggattgctgacagtaattaaaccattttacaggagtgactgtatgcctcacatataccttccattaaacccaaagtaaatgtgtcttcaattcaaatttccattagccagattccaaaaatacccacagccactccagtgccacccaacaggaggctttagccaattatgtttaagatattatactcttaggccgggtacggtggcgcacacctgtaatcccagcactttgggaggccgaggcgggtggatcacaaggtcaggagttcgagaccagcctgacaaagatggtgaaatcccgtctctactaaaaatataaaaattagccaggtgcggtggcaggcacctgtaatcccagctacttgggaggctgaggcaggagaatcacttgaacccgggaggcagaggttgcagtgagctgagatcgtgtcactacactccagcctgggtgacagaatgagactccgtcttaaaaaaacaataaaataaaataagatatactcttgacaatttgacaaaaaaaaaaaatacaacgagggccttagaagagagccatgtatctttatgatctttatgtgaacatttaaccttttgtaagagtgctgtcccattacactatataatgctactgtgcaattctcaattatttcatttgaaagttatttatgtaaagagttgattatgccctttctggagggataagaatgtggtggactaacttactcttggctaaatcacatgaacatgtagaagtgaatacattagttggattactaccttctctggccggcagaaggtactttcagttctgcaggcagcccctgaacgccccagtggttgggcagcacctgtgatgggatgactgaaccgttatatgccacatgtttataggcgtggtagacagtatggggaggtggaaaagactggttctgacctgacacacatttactacttaataactcagttattcaaattgcacctctttgttttattgtcctcggggttcagaacagtacaccaaaacgctaattaacaaactatgagacagcaacagctgggaattcagtgtagtaaaataacatataaatgtgagacattggttgtcaacagagaaggcccatttcctcatttttatttaaaaaaaaagactatcagtgatatacagtgattagcatactggagttcttttaagctatgcacaatgaggtatcttagaattaaactttagaggttcaaaataaggatatgatatagaaaagattgaatggtaggagaacagaataggatttatttatattatgacaaacgtgactatcagttaataaattggagatagtaagttaagatcattatttatattatggaaaaatgaagaaataggacatggttctctaactttttaatttttctgtgaaataaaatattatgacttattttatttttatctttgtttttaggtaagactgtgccaaaatcccaaacttcagttgaaaaatagcccaccatatatacttgatattttgcctgatacatatcagcatttacgacttatattgagtaaatatgatgacaaccagaaacttgcccaactcagtgagaatgagtactttaaaatctacattgatagccttatgaaaaagtcaaaacgggcaataagactctttaaagaaggcaaggagagaatgtatgaagaacagtcacaggacaggtaagaagaatatttcagatgttttggtgtaaaggtcatttatgttgctttttacttaatagttaacctaaacgtcaccatgtaattgttttggggtaaatgtgagtcgctttgtatatagtcatgtggtacttaacgatggggatactttacaagaaatgcatttttagacaatttcattgttgtgtggacatgatagagtgtacttacacagagctagatggtattacctaccgcacacctaggctgtatgatgtagcctattgctcctaggctgcaaatctatacagtatgttactgtactgaatactgtgggcagttgtaacacaatggtaagtatgtgtgtatctaaatatacctaaacatagaaaaggtatggtaaaaatactgtataaaaggccgggcgtggtgggtcatgcctgtaatcccagcactttgagaggctgaggtgggcggatcacttgaggtcgggagttcgagaccagcctgaccaacatggagaaaccctgtctctactaaaaatacaaaattagcccggcgtggtggcacacgcctgtaatcccagctactcgggaggctgaggcaggagaatcgcttgaacccaggaggtggaggttgtggtgagctgagattgtgccattgcactccagcctggacaaaaaaaaaaatactgtataaaagataaaaatggataacctgtaataacctgtataacatgcatggagcttgccagactggaagtgagtgagtgaacggtgagtgaatgtgaaggcctaggactgttactgtacactactgcagacttcagaaacattgtacacttaggctacactaaatttataaaaaaaatttcttttccaatatgaacagcctactgtcacatttaaacttgataaacttttaattttttttaactttttgactctggtattaacaattagcttaacaaaaatattttctttctatattaccctataagctttaaaaaatgttaaaaaattaagttttaaaaaaaattttataaactttttaaaaactaagacacaaacacacacattagcctaggcctgcacagtgtcaggatcatcaatattattgtcttccacctccacatcttattccactggaaggtcacacaatatgtaactttttcagattggcttctttcacctaacaatttgcattttagcatggagcaataacatgcatggagctatcatctgtgataatagtgccttcaggaatacctcctgaagggcctgcctgaggcccttttactgttagctgttttttaataagtagaaggaataccctataaaataatgttaaaaagtttatagtatagtaaatacatcaactagtaatatagtcacttattataatatcattatcaagtatgtgttatgcataattgtatgtgctatgcttttatgtgactggtggcacagtagatttgtttacaccagcatcaccacaaacatgtaatatgttgcactatgaccttgtgatgactatgacatcactaggtgataggaatttttcagttccattataatcttatgaaagcactaacataaatgcagtctgtcattaactgaaatgtccttgactgaaatgtcattacggggttcatgactgtatttgcttttaacattaatagctttatgtgaatttacttatgatagtagctagttcatgagacagtattctcaatgttttaatagacttcattttcagagtcattttaggtttacaggaaaattattcagaaattacagttcccataaatctcctctgcccaagcagtttctcctgttcacatcttgcattggtgtagtgtgttatagttgataaactattgttgatacattattattaactaaagcctagagtttacattagggtccactttttgtgttgtgctgttctatgctccataaatgcataatgtaatatatccaccattacagtgttatatagaattgtttcactgccctaaaaatgccccgtgatctacttactgtctcacttccccccctgaacccatggcaaccgctgatctttttactgtctgtgcagttttgccttctccacagtgttacatagttggactcacacaatatgtaactttttcagattggcttctgtcacctaacaatttgcattttaggttcctccatgtcttttcataacttggtagctcatttctttatgccactgaataatactccattgtgtggttgcatcacagtttggtttttcactcacaccttgaagtacatctcggttgcttccattttttgggtaatcatgtataaagttgcaataaatatttgtgtgtaggtattcatgtggatttaggcttttaactcatttgggtaaaatacctagcaagattgctagattttcagggtatgcataagtttagaaagcacataagaaactttcaagaaagtttgtaagaaaccccttgactggttccaaagtggctctaccctttttcattcccaccagcaacgaatgacagttcttggtgctccacatccacaccagaatttggtattggagacaagtgttttaaagacatagtttgattgaatctgcggatgtggtagatgtgggtgggagatgtaacttccatctgtgtattttgacttaagtgagaaactgaactgggctggcaaagactgaattgacatcaaccaaatcctaattttatagccaggattcttcatttagatatcctcattcaagtttattgtttggccattctaatgttaaatttcaggatctatcttaaacaaaataaggaaaatgatagagttttccatttctgggctattttaaatatatatggaatattcatgatagtgatagtttatttagatttccaaattggaaaaccaatattaatgaaaatatatagtgtcttaacatgttagttaaattttagtgtgagactcttaacctctctgtatttagttttctgacataggaaaacctttaagaaacctctaatatttctttcaggtcagaaaaactggcctcatagggttgtaaaatagaaaattcagttatggaggtatgtgaactctaaattttctatgaatactggccaaatacccataacaagtaaaaccatcaaattcaaacataaaaaaccctcttccaggtgtaaaatggcataattatatatttataatttataattttctctctcaattagagatgaacccaaacatactcgtagacgtctaaccaattatgtaactttgggctcgtcacttaatattcttgggccacagtttattcatcttgagggtggtgaatcttcctgttgccttttagcattaattaatgctttaaaattctccaggaataacaagaggaatttgagttgccacagtgtgacagaagtaaggtagagaaatattatagtgattgtttattcttgtacacttttcaagaagtgctaacatcttgggaagtcagatatttatgttaaatttttatttttcacattgtatttctgccattgacctaataaaactaagttctttacaaatgtctttataattcttttttcaaatttagtagttttgaaattcttcctgatccagccaagtcatccattaaattttactctttagggtatcagtacattgacaaggcatataactcctttgactaggaatttgagtggatacagtgttttaattggatgtaatcatatatgatgtggtaaacttgtatcccacttttacatcttctgtggaaacttgaaacattttctaactcagtagatgttttataatttccatttgataattttgatagttttgcttatgtggaaacatttcatgggagacatttaagttttgtttgataatgtatagattcccatagattttgatagctctcataatgctgactattcacaatgaggtcactcattctgtgtattcttgcctgcattttaagtgtccaagtgaattttgttcactgtcctaaatgcaaccctaagacaaaatttattggtttctatgctgatatagcatatccttaattggatattactgttatccttgttctgtttactgacaatgttctgtggccagctgtgtttatgcagaatttacatttgataaatgtttcataacaattcataataatgtaccattcttggtacaccataacaggcacataaactttcgaactgtgtttctttttctagtaatatatttggacacattcacttctaggttcccttaggattccaaatgcaaactgagtctaaaatgtgccattgcacatggagctctgaggcattttgctctacagaacacagaagagtcttcttagcatgttttcatttacagagtggcctcattctgaatagtcagcattatgagatctattgatctatgaaaatctgtacattaccaatcagaacctaaaagtctcccatgaaatgtttctacataagcaaaacaatcaaaggtagttaggcaacaaagtatatggtttagtagaatgactccacctaatcggtatgacaacgctggttactgggaatattataaattcactacagaattgtttctttgattctgtaagtagctcactagggacattactataattgagctaaaaatgaaggacagtaatagtagaaacagtaatttggagttaattgacttaatcagtattacttcatgtgattctgcccgctttattgaagaaattgtgctggatgagtacatgaatcaaaatgcatattttaatgttcctgcacctctgttgtgtcaacaataaatgcggattgttatacatttaaggggagatgagaaaaaatttaggtgtcaattctgaactgattgctttttaaaattttagttgattgttaatgatgaatgagtagcccgaattttaaagcaattttacataaatgtaataaatagaaagataaagaagtaaatggcattcaatacatttcctagttacttaggtcctgtgtagaaggagagaggtagaaattatagtcacataattgtatatgctactgaagtagatatttagggcacagtgaaagtcttttgccttgagagtagataatgatttctagtagagaaaaggcatgagcaggctgcatgcctcccccgactgatacagtaaaccttcatcttttatatcatttttcccaaattgttgttgttgctggtgctctgttgttttgttctttttctttctttctcttttcctgcaaacagttcaatgtcacactgagttggtgctactccagctgggtgtctaaaccattctgagctgacatttctgggaagagtaattcagtgatttctgacaagcataaagcttgcatgtgtatgtgtgtgtatgtgtggagagaaggtaaagaacatgtggagaagtctgtagtttgaagcatagagaaaaggagaaactctaagtattatattacttaaagttttagtggcgcaagtaaaaatggatgtgaaggttgtcattgctaacaaatgtataattgataggaggcatttctatgattttactggcagtttcatcagttaaccattttaatagtaaaatttatttcttctgaaaagtgtgtattaatcagctgctctgcaaggtctggtgttggccactgtgttttttaaaacactcagatgatggccgaaggatactgagattttccctatttttgaactgcttgagtgagccagggtgctacaacccattttcccctcctacacactgctagacaaccactggaaaaaaagtcaactgaggtggaaaaaatagctctgcctttgatagactgtgaagaaaataaagattaacaaaagctctggccagagaggaaaacatagatgttgccttaacattaacattaatgtcatttcagagcctttgaatcatgccttaataaccagtgttgtagaaaaaataaatgacaaaatggggtgtgtgtgtgtgtgtgtgtgtgtgtgtgtgtgtgtggtggagggttacatgttctgtagttaaaaaaagtatttgacatagaaaaattagctctagaagaagctagcctgtatttaaaaggcttcaggagcatccggcagaaatatttttctccattgactgtttggctaaacaaagaataatttgtaatctgctccattaataaagtgcctttccccttaaaggactacagatcactatgcttgctgtttctacttgtgttggttatttacaagatagtgtaccaaaaaacattttgcaattggtacgttgaagatacatggttaaaagttgaatcaaaagcaacagcagccacaataataacaagagcaacaacaaaacaaaagctgcaaacaaacctactttctttccttatgttactgtatgacatcattgctttgagtaaagaatacagtagtattaatttaaatgcttaaatttatatttatacaaatgttgatagcatggtcattgaaatagttttgcaagtcctcacaggttttcagtttaccatataaagagattgatctgtatgtgtaatttgtgctttaagtggtagttttaatagttactggacctcacagtttaatgggcatgtttataatgctacatcaattaccacattttctcatagttctgtatattgtgagaagaaaatgaaaaaagtgctgtttaactaagtacaggaatgtggagccaggaaatctcatgctctgatgccatttcttctcccagtgttctttgtaactttggttggcttcctgactccaatttacattttttcagttattaaattattttctggttattcataacattttcacctcagacatttcaatgtcacaaatgaaaattaagttgtttcagactaaatgctactgttgctacctcagtctgttaatatttcaactttagtagtagtttctatagtaaaaatattgtttttgttattataacaattatttgcaagagaatcttaagaaggtttgtcttttataaataaattatactatattggatatctatgaaatatgtaatgatacatgaaagggaatggcttatattcatcattaaaataattttacatttaaaaaattaacctagtttttctgtttctcctttttttgtttactaatggtgaaaattgcaattattttgaatttgatgaggacaaaggaccaattgcaagtagaaaatatttctaaataaatcaaaataggcaactaatttcttttgaacacaagtattttgatataaacatatacatttactcattttttctatatttgtttgcattcaaggcattttttccttttaaatgggaaactagaggaatgaaaatatgaatttttgatacttcaaaataataatttttatcttggattcagaagacaaatagtaatcaatctcttatgtagaagtatgtctgccagataggaagtagaatttgctttagaaagcttgaaaaatcttctgagattgatttattgtaaatgaataaaaagtttattttatcttgatgagaatgtttttatgcatatttcaagcatctgagtggtgtgaatagacttttctaaagtttggaaatgaaggggctcatttctttaacacaccatgaaagtagaggccacaagaaagttatttagacaaatgttttcaaagttaaacaaagggagtctgttaggggaggcaggtgagagcttgcagaatctttgactgttaaggactttatggccctgtgtatttggctaactgcacccctgctgcttagctagctagatacaatgtaattttcttgttgatttttcaatgaaaagtgaaagttttttttttttaatagcagtttcctctctagggtatattttacaaaatacaaaagaaaacgaaattattcagatgtaattaaaatgaattccaccattagctttttaaattttaataaaatgcttacttgtaatacatttatttgctatttatttcatttatttagtttagtttttttttttttttctaagccccatgttaatactgttcagcccccaactcctggtttcttagtaactaaaacttattgcaagtattttaatttcttctaaatcagattatatattatgcacatatgatatttggatattaaaattgaggacttttttcccccacagatgagcatttgttaaatgtttatatattcctgagaatgataccaattattatatatattaagcaaactcacaagactcaagtgaacttggctttgcagtggaataccgtttatgtttttcagtcttaggtagcttattaaaattgatgttttcctttcagtaaatatctggtgacattaaaatttgataattaaaatccagaagcactcaagaaagaatgcctgcttttagtttcataataacaatactcccacaaagaaagttgatgaatgatgtctttcaagtggcagagttgttatttagttaaagaaagctcctttggcagtttcttacaaaactaaattaaagtttgtttataaaacagacaagctacagtgataatcctatagcctcaagagtgcttggaatctagcccaagaagagtcttgtttttcagtgatttaacaaagaagtggagtttccaagaatccaaacagattagcattcagtgctaattgggtagggtgtaaaatagtattcatgtctgattgttttgatgtgaagtacttcataaccattccgttttctaaatcttttaaaaatattaatcttttgtctcttcagatttattgtttgagcatgagtttttgtttgaggatatatgtatacatcaatggttcatagatgtgctgtaaacagcaagacacatgagatcattacaaaaagtgccctttatagattaaaataataaagagagattgaggctctgttgttcagtggaaacattgaagaacaaattaaactgaaagataatttagatgttctattgaaatgtattactttgaacatctgatcatgtgattataatataccactttcacatataatcacaaatgtgtgactgtatttgtttcttcgggctgcggtaacgaagtaccacatactgggtggcttaaacgagagaaatttattctctcacatttctggaggcaagaaatctgaaatcagggtgtcagccagcagggccttgcccctcagaaccctctagaataggtaatttctttgtctgtctcagtttctggtagctccaggaattccttagcttatggcagcgtaagtctgttctctgctctgtcatcacacagtgttctctgtgtatgtacgtgtgtgtccaaatttccctcttacaaaaacaccagtgattttggatcagagcctacccttgtgaccccatcttgacttcattacagctgcaaagatgctattttgaaacaaggtcatattgacaggtaggattgaggttagaatttaaacatatctttttaggggacaccattcagtccctaacagtgaccaaatatggcagtgtacatttatactaaggaggggaagaaagttgaaacccattagaacatgtcatggaggtttgaaaaacttggattaatagaatataatagcaaacaaaattacttgtaattattttttgtaaaggtctgtagctgaaataagtttttttcaggtgtgtaatgcatggttaatttatgcattagtttttataaatatattggaaaacatggcatattctgcatttcccaataatacatttttgtatttattgatataattgaatttgtaagtacctttttttaacattcttaccgattttaatgtataaagtgccatctctctttagaaattattagtaatacaaatatgtacatttaatttacatttataatattaatagccctggttatttcttaacaatccctgttttctttaattttgtgataatctctggaggattaattagaataattataacttattaaatctgtttataaacttttccctattgcacatagaaaataaataattgggaagtgttttccatgttggtgacaaagagaaggcaacaaacaccacattcattttgtctttaatattaaaatatggagtattaaacatgatttcaattcaaattttaggaaatcaatttgaggattttagtttaaacaagagtaaatgattgtttctgaaagtggcatgttgaatggtttaaaccatgggtcagcaaactgtacagagccagatagtaaatagtttagactttgccagatggtctctggcaattagtcagcgttgcctctgtactaggaaagcagacatagacagtctgtaaattaattgacatggctgtattttgataaaaatttatttacaaaaatgagccagaccaaatttgaccattgggtggtccttcgccaacccttggcttaaagtacctatctaatttttggagagtaaaattttaaaactattttatcaacaccaatccatcatataagttgcattatatgtaagtttcatcaacacagactgagtatataagttggctaaaagtaacaatacccatctaacagtacaatgctgtcagagacccaggctctttctggcttattgtaattcatttccttagcatgttgggttttatcttcattctgttcccttcacagttgtggaattcctgttgcagcttcattttttaaggacacaaggcaggaaaggggaagggcaactccacacgtgtctgtcttcttatcttgaattgcaaagctgtcccagtaccttaccacctacttgcttctctagcagattctcttccatattatttaagccactgggtcactccaggttacaaaggtagcggtatattgaaactttgaaatttcagcctccatagtaaagaagggcaagggagaaacggtgtttgtttagtcagtctaaattgtcaaaggagatagccagatatctctttttgagagataaacagacactcttcatttaaacatggtataacttggctttaaggcatatttctttaaaaatatattgtcaaggactgcgaagagcctgaagctactttgccatactttcagggctagcagaagacaggagaatatttggtcggggaaaatgaaccatttattagtcacagagggacagcattaggcaaggggtcatcacttgtgccaggtcaccaaccctcagtttctataggacagtataaagggcaggagacacctgcatgtgcagtggctggcattacagatgaatcccaagcctaaggaccctgaatttttataatggacagtaaacctgcctgactcttgctctggaaggagacattatctttattgaactggactgtaaccctctttttttttttttctccagaggaaaacactgtccctattatctaaggctgtttgatacacaaatgttcctgaaaggataatttgaaaggctggcagtatctggttgcaagacatgaaaaaatgtgggagacctatagatacttctccccaaaatatttatgttctgttctttcttaaaaaccataatgtatctcatgttctcagttttgaatgctacttaagagtaaggatatttactctattttggattattggtaagcttaaaatcttgggttctgggctgggcgtggtggctcacacctgtaatcccagcactttgggaggctgaggtgggcagatcatgaggtcaggagatcgagaccatcctggctaacatggtgaaaccctgtctgtaataaaaatacaaaaaaattagctgggcgtggtggcgggtgcctgtagtcccagctactcgggaggctgaggcaggagaatggcgtgaatccgggaggcggagcttgcagtgagccgagatcacaccactgcactccagcctgggcaatacagtgagaccccgtctcaaaaaatatatatatatcttggtttctgccattttaatatatataacaaattatgtatttgatatatctaatatgtatattagaaatctcacatatatgtgaaataatgtgatctccagaacaactgtggaaactttgtggtgtgaacatttttaattcctttttttttttttttgaaatgaagtcttgctctgttgcccaggctggagtgcagtggcacgatctcggctcactgcaacctccgcctcccaggttcaagcgattcttctgcctcagcttcccaagtagctgggactacagatgcacgtcaccatgcagagctaattgtttttgtatttttgtagagatagggtttcaccatgttggccagactggtctcaaactcctgaccttaggtgatctgcccacctcggcctcccaaagtgctgggcttacaggcatgagccactgtgcttggcctacattttttattcttgtttgcatattagaaaaaaaactttaataattaaagaaggaacagttttacaaagacttttcatttcaagctcattatcctttaaaagagaagacgattatattttcttctttttttttttttcttgagtaatacttcattcacttttcaactttgactactgtaactttaggtttagacccaaataattggtttcagtaggtaaggaaggttgaaattatgtgatataagaatgatattgtttatctttgttatcagtgtctaaacctcagagatgagcaccaggtagtccaattccattttcctgtgtggagaagctaaatagattggaggttacatgacttgacacactggggtgtgcatgtaatattcatgtgtgatatatttctaaatgaagtttcgttaccagttggcatgtctgagcctacagctgttggcatatgaagggtatcagaattataatgcctttttcaactttgtttcgggaggactcatttgaacaattagcacattttatggttgtgaaaatgaactgttgttttttctcttcattaaaccagaattaatattgtatgtcatctggtcagtcgatgcaacttttttttttttctaacacgatgcttgtattcattaaattcagaaagactatttaaagctttatttttcaagtatacctttttctgtaaatatctcttcctttctcactctgtttatgtatatacatgtgtgaaatattacttgtaactttttaagcatttaatttgtcttgatgggcacagatttttaaaaaggaagtaagaaagattacctagttttttctgaactatattaatgataaagcatctcagctcattttacagatgctgaaaacccttcgcgttttgttctgaaggtttttgtagggcatactgattttctatgaagtatgtggagctgtcaattttattcttttttccagagatttcagaaaattttcatttaactaaagatttccatcctggtcagctgggtctcatttacctgattaaaataggtttgcatggataaagtcttaaagcaaattctccttaccacattttgtgtgaattttttcctctttaatactaattttagtttgttctcattacaattgcatatgtaaaaaatactttttgataaagcaactgaaactttgaagttgataatttatcacaatacttttttccccattatatcaacacttggcaaactacagactgtgagcctaatccaggttgtatttccttctgtgagtaaattttcaatggcggagccatgctcatttatttacttactgtctgtggctacaatggcagaggtaagtagttccatagagactatctggcctgcagagctgaaaacttttactctctgggcctttactgcaaatgtttgctgattcctgcattactgatatcattttcataacagtcttaaaaacttggcatttttaaacttaaatacttttttctttttgtcgctttcttctctaccctatctctgccagcagttctttgtgaattaccattgtgatcttctaaaggcaaaaaaaatggtaggtagtcaatgactgatagctatagacctatgaaactaacatttcctatcttgtctcaatattctgatgtatataatcattttaaaacataataaatttaggccttttttgtttttgtttttaacacaagatatgccactaatgtctgacaagcatttaatctagtggctttcctgcattttccatggatcagatgcattctaatcctctgaaatgattattaaatacagattgccagcctttatataatgcctgctaaatttaccagttgggatctgcacatatattggtaaagagtgccctagcagtttctgaccttctgtctgctttcagaatccacatgagtcaaattatctccttttatgtataatcttatcaaggactattgaggtggcacaggtggggatggaatcctggatgtgttcagaactcctttcattttactaagcttcctttatactaccagaggaatccacttccagtctcgagtcacttagaagagggggccgggcgtgatggctcatgcctgtaatcccagcactttgagaggtcaggagatcaagaccatcctggccaacatggtgaaaccctgtctctactaaaaatgcaaaaattagctgggtgtggtggcatgcgcctgtaatcaggaggctgaggcaggagaatggcttgaacctggtaggtggagattgcagtgagccgagttcacactactacactccagcctggcgacagaaaaaaaaaaaaaaaaagaaggatacatttctgtaaggtttttaaagttttgttggaaaagatggattgcaattctcttcttatgtttttctgagattagcctaatcactatccttggaatttacctttgcttgccagccttttatcctgcccctttctcctccctttcctatttccagtttatgcagatattctttcttattactggcatagctaacattcccactctatccccatgcccatcttggctctgattttctgatcattctagctaaaatgtgtcttttccttctgaccatagcatttatcaaggcctttcatgtggcagttaatgatatattgtcaaatattgttatctttttaaaatggtgttaggagcctgggtaacagagagaccccatctctacaaaaaaaaaaaaaaaaaaaaaaaaaaaatagccaggtgtgttggcccatgcctgtggtcccagctactctggaggctgaaatgggtgagattgcttgagccaaggaggttgaggctactgtgagctgaggtcatggcgctgcactccagcctgggtgacagagtgagaacgtgtctcagaaaaaaaaaaaaaaagaaaaaaaggaaaaaaaaaggtaataggctatgtctcttctgtgtctcccatggtatccagaacagtgctttatacttggcaaacactcataataatatatggttatttctttagaattactataggatgatttgaaaatcctgatgtattcctagattacgagctgctggggcctggagggaggcagaagagagatgttacaatggaaagtgttgaagtgtctgaaggcttgtttttagaatttgtaggtacactctgaatgtcagcttcttcacatttgggaatgagtactggcgattttagaagaaaagaaaatgcttataaggatagtaatatcattattatttatgttttaattataaatatatttcaaagcaactcttaactgtatgtattctcaaaatagctttactgtaataacattcttggacaaagttcatgaaattactacagtttacaagtacttctttaatggagtgtccttgtagctacacttagtacctgtaagataaattcctaaaaaattcacatcattctgcctactctcacaaactactcaaagcaatgagcatattgcatagctttcttattgacttattagttctgtatctgagctccaatgagtgttttcacttcctcttattcttatattaacatttcttcaaagactgtttttgtttctgtgatgtgttgtacttatgaccctgaatacacaggacttttcggcaactggggaatcctccaaaaatctatgctttcgacatgaatagtccagtttcatttggtatgtattattgacagaagtgcttcatcctctttatagcttgctgtgcagcagatggttgttatattattcaggactcttgaggcagtgcattaatacgcgtgcacaatgttttttaagtcttattgtgggaattgtcttgtgtccttgttgacggaattccttaatacggatgaagatttccaaacttgaaaactagtttttaaattttagctaaggctattttgtatttatgtattgcttaactgctatctctttttctttccttttaaagtaaaggtcggagggttggatctaatattcttgctataaatgatttttttttttttttggtcttgttttgttttgatgtgagcatatcagctttgagggacatctgagatattttgaatatgtaggcagggcttttaaagaaaggaattgctgttttcttacatccaccatgcagacttagacttgacaggaaaacagaggcatgtgtgttctcactgtgtattatcgttgcgccccctcacatagctgttagggtttgtcagcagtttgttttgactcactagaccaagggtgggggtggttttgtgtgtttttgtaagttaactagtgtgggatgtcagtaatctcagctttaccattttagttggccatgatcccttcatgtaagaaaccgtcatatttgccctatttctcaggccatactgtggttccgaaacttgcccgtaaatatttgtgaaatagtttttcttttcttataactctggaggtcaaaacccagccctaagataaactcctgtttcatattgcctctgcggggtgctcatggtatgtccccagactaatttgggaacctccttgaattactttttaaaatttatctggatagttcttacacaattaaatttaatttttatttattatagcaagattgaggacactcccaaatccacacttcatttcctgggagatcatgttagacacagataactatgctaaattattttgatccaggtaagcgtgttagaaagagaggatggggctgctggacttcattgagaggatcttttgatttcagaaaccattagtgaaggaaaggtgtactagacagagctgtcataacctttttactatttcttaagagaagtggtacctctgagagttgtgtaacatggtggtcttcccacatctttatcaagagattaattaaggttgtgaagtaaagctttagaggtgaggcacaaaaggcaagcagtgtttacctctaatcactcgaggtaacctttatattggaagatcagtgtagatgtattgtgtaccagataacattccattatgtaactattctttatttacttcctctactgtatgtgtggcatcattccagcatcaagtttaatccttctttgtatgcatttattgtaaactgtcatttatgtgggattaaaataactggaaagcctaaataactggaattcttgtagcatgtttggtacttgacatttaaaagagagacagatggcaagtaaacaaggtgagagcaggactttatttgctgtactgcaatctcaaactgctgtcaagaattttaattagatgttattttaggaagctttcaatttactgcaggtcattgaagcttagaaagaagcagaatgtacaccaagtattttaatatgttagcaatccactgcaattagttaatctggagctagtaggttgtatttttaagagtgtaaacattttactgggtttcagtgtgacttagagtaaaataatttttctgtttaattttaaatcatactattttaaatttctaagttgggcttcagtatcaagttggttgaattaaagatttaaatatttctcctgatgtcttcccttctccttcctactaaactggtgttcatttttctttatggtgatcatttctaatttcccacagcttccctggacatttccttcactgtgagatagtagttttacacatcattcaacatccagttgttcagttttcacaaaaagatttctgagaaatctgacttcaaagttactcttttcaaactgaagctcgtttttagaactattcatgatataggaaaatacattcataactgaaagctttttttgggttattctttgtaacattacatgccgcttttcaccaatgaaaagaatcctcaagaacctggaaaaagcaattcctttttgcagttaaaatgaagataaagagccttgaaaaatggctgatgctaatagttcatggagattaataagtgatatgtgaaaggcagactgtcctgtagttgcaaaatgttacatagtttgtacaccttgtcagcgttgtgataacatgaagtcatagtttaattggtaaacaagaaaagcttccaataaagtgtcccatggatgatcttttcctttgagactgcagcatttctgaagaatatagggtatcttgtgatacagcaaggtaaaagcagggcacatcttccctatgataaatctgtgctcttattgtcggagtttaacctagtccttcatattttgtttctgaatacttgagttcatttatgtatagtggggaagattttgtttttgattttgacttctgtcatgcttgcttgcttacttgattttcttttcttttttgagatggagttttgctctgtcgctcaggctggagtgcagtggcgcaatcttgtctcactgcaagctccgcctccctggttcatgccattctcctgcctcagcctcctgagtagctgggactacaggtgcctgccaccacgcccggctaattttttgtatttttagtagagacggggtttcaccgtgttagccaggatggtctccatctcctgacctcgtgatccacccgcctcggcctcccaaagtgctgggattacaggcatgagctaccgtgtccagccctatttctttatttaaaaatgacaaatacatttatggttgtactacatgatgtttctgtatatgtatacattgtggaatggctaaatcaagctaattaacatagccattacttcccatacttactttttttcttttttaactggtgagaacatttaaaatataccctcttagcaattttcaatatacagtacattgttaacctcttgaacttatgtctccggtctaactgaaatttcgtatcctttgaccaatagctcttcatccactgcctcaactgcccacccccaccccaggaaattgtgattgatatattttttaaggttgttgaattaattgtcttttttgcagttaaaaaatatattaatagtaaaatgggctaggtagagattttttcagagggcaagttaattctggacctgacaaccttaaggtctggaaaaatagttactctcaaatttttttttttaaaacgaaaggttttacttaattatcaggttctaattcccttaggatactggtcttcagtgattgtttaaatgtctcagaggaaacttatataaagtttggaattttcattttaaaatttgtgttgttccaagatttcaaaacagatctaatctagattattattgatgttaaatgatgtaaaataaaagtatatttaattttagaaatttccattaataataaaattattcaaattataaggaatatacccaagaatgtgagttcttttcaaaccagaattaaactcatttatatttataatacccctaagtactgaaaataaatactaacagcatttcttattcagaaaacaaaactggttgcaagcagcaagagaaaatatcttgctgagtgtcgctttgaaagccaaatgagttgtaaaaaaaaagtaaaagttcctagtttttgttttacaataaagtttctaattttgtctttagttttaactgatcatagaaattaataagcctgtctgtctcagagagagatatttgttctgccttcactattctgcctgaagcaggattctggaatgttcttcagaatcatgcagaatgagttgtaattatttgctacagaatgagttgcaatatttgctagtcttcaaattcattctcattattcaagattatatgatcagaatgaatggaaactgcgatggctataacctagagaagtaataagacaaaaagcattatttactcatatgaagggtttatcattcatatttcttcatcatctacctttctagattcatttcacgacactctccctcaggtcttccttctttatccactcacatcatttttcagtttttcaggcctttaggacctccacatctgaggcttcatgtgcctgatttttttccaactacctaacacatctttcgtatcataacttaaatgtcatttcctcagagaggccttccctgagtgatcattaaatgttttgacacattattttatctcatggtattctgctgtgttctttccagtacttgtcacagtttctgtttcttcgttttcttcaccactgtcaccacagtgcctacttcatttccaacacggtgtaggtactcaatacagattgaaggaatgaaggatagataatgcactcatcttgagctacatcctatttagtgagcaccataaaacttggcaggcattgttagacctttatatggacaagagctttgatggttcgtttttgttttgttcagttttgttttctttctggagatggaaaaagaaatttaatagtgataaagccagagaaacttaagctggacctgtcaatctggtatggttgagaggtatttattttaatcagctgtggattgtattttcatgtgacattttaaaaaggatgaaaagggtcttacagccacatgcatcattcttttgcctgctgatccataattagaatcagcatctagaatctgtttttgtatataactgaagtatcagagttacaagtaaaaccactttccacgttatttgttgtccattaactgctgaagattagcatatttaaaagttttactgagaagcacataattggaacctgatgtttgttatttatcctgattcatgttatattttcttcttagtggacattaaaatttcaaaattgctataacagaggtgctgttggggtagtttcttagttgtatatgggtcgtatattgtatatgggaatctttttatggtacacatctgttttcatcaaataggtgagtagtattcgggcattaccttataccttctttaaagaattttcatccattgctttaataattatattatgccagctctatttaatataattaaatttttttttaaaatttcctgttgtatcaacctgaaactactttgactagcattttggctgcaaccttcttttcttaactgttcagtatccctctgtgtatttttatttggttcccttaattggaaataatttaaaaaacataatgtgtgactttcttgcttactcttgaataacatttaaacttcagcctcacttgtctaatttcagttctgaggtatgttctacttgttgcctcctcaaattgctttgccttcctgaaaagtttttcttttgattctacatattttcaggggagggataaagatctaagcataaatatcacctccttagatgggtcttttttgaccatcctatcaaataggttgtcacagttagtattgtgaatattttctgatgatttattttctcccccaacaaattttaactgtctttcaaagtataattgaagttctcattcttgaagcattttctgaataatcaagtgctagaacttgagcattttttagcttttactttttgtcagaacattgtagttggtggtgtagagacagttctatcttgatgcttcaggttctcatttctacttgagggaagctcacaattttcaggaatcacggaggatggcatttgagcccgcctggcggtctgagcccacctggagatccccatcctttcaatggggaaatgtatttgagctattccccaagctaatgctcaggtaggagatacaggcaggaaaagatgtcatggaagatattttaaaggaatgggagtatacgcctagcttagaatacaatatgtgaaagcatattgtattgtggttctttggtgctggatatctcaggagtggaggaattgaaggattgtgttttcatttttacactttttctcttctgctcttctgatttttcaaccatgaacatggttatgtgtatggtctggtttgggggaagtatatatcagaaaaaataaaacaagaaaggaagttactctggttaccatgcaatttcgtatttaaatgacaaggttttgcattttggatatttcatgtcagccgtgtctcctcagctaagttctagtcacttagaagtttggtgtcactgaattataattttggtgcttcccatgttttatatttacactagactacatgctatatggacaatgtgcaatcagttaatatctgaatgaatgaattgaccaacttttgagaacagagtttgacataaatttggtggtttttggttcattgtgctttaattgaaggagaagtagacattgtacttcacattaggctactctttagataagctttccattacatggcatgtgtcttactttcttacttgataatggctctgtttctgaaattatataaacagatttttactgtttttaaactttacaacttaatattagactgtaaattatttacttatttattggaaacaaacttttagatacagaaattggtcttttaagacaacaacaaaaaatacctagtttttaatctggctcctgtctttcatgactaagtctgactgatctttcttgttatatgatgctttataagattgattctgtatccgggttaccaacgcttcctgtaacagaagaaaaacattcagatccttatagtgctgagtcaggggaaattattacatacaacaaaggaaaagtctttgataggaaatattgcttctggtaggaaattaagtacagagtacaaggatctaaatgtctgtcatataaacaatgggcaatcttattaggcaattttggacacctattacgtggctttatttatttattaatagtaggcttttctcatcatggttcatggggatttgtaaggtaacgataccctggacagccttccaagatgttttgatgttggcagcaatgcattactggggcaggggcaggggaggaggtagaaagtgtgataactctgcatcactccttcttctttgttctcatttataacacctaaggcattggaattccccagagtaagaattctagtgaaaagggaagcaaataaaatacatctgacagttgggatccttgggtttatacatgtgctgactaattacatatgaaatgagatatccccttaaattaaaactatttgaagataccacttcaaatatatgtaatagatgatttacacttcttatcatggctttcaatagcaagaatttctcttgcagtaggataattaactagaaatataaagaaatgtttcaaaagtataataatgtagaagaaaaatagaaaaatttgattttggaagaaatcttcctccattattatgaagatagctgcagtttggtttttttttttttttttttttttttttttttttttgggacggtcttgctgtgtcgctctggctatggtgtggtggcatgaacacagctcactgcagcctgtacttactaggttgagccatcctcctgcctcagtctccaagtaggctcccaagtaggtgggactacaggtacatgccactatgcctggctgatttttaaattttttgtagagacagggtctcgccatgttgcctaggctggtcttgaactcctgggctcaggcatttctcctgccttggcctcccaaagcgtcaagatcacaggcatgagtcaccacacccagctgatagctgcagttttgtgtgtgagagttgatcttcttgcctttactgtgacaaaacatctttatggaaagacaaacagtattcgttacgtttattttacctgtgtattcaagaatgtttatttttttcataagctacaaaaccagattagaaaagtaacttgtatttcctaaaaggaggcatattttaggagctatatgaactgggcatttttaattttttttcattactttggggaatatttcaggatctcatcagcattcattacatgggaggacaggggattaaaaaaacaaaattgattgttaatgaatttttttttttttgtatttaggaagaagaaagactgtaacttaaaaagaattgtggcaaattatatatgttaaatattctggtctagaaatgtggtatagaggttccctagaagcttctgttccactgtggttaaaatgttttctcaccttcttgaactgtctttgtaggtgatgtcatgaaatgtcccaagagaacgttgtataaaacttcctttgacctttctggactcagggctgagctccttagacctacagtttcttgttaaaatcgagtaggttgtgtttgaaaaataaagtttatttgtaaaattatttcagtttatattttatgtataatcatctctcttacaaatatatgactcaaggaaagatagtattttgccctagggtcaagagtgaaattatttaaacttattagtgcatatttatttcttttctattttatgctaaaaaaatgtgtggaactaaaatttgaaaagatacttattttgttagtttagaaaatgtttagtatttcatataatcttaactttcaagtattttggcgtctatcttaatattttctcctttaagaaaagacaaaaattaaaaatcttattctaacttagtttagtccactcagtgaaacagcatttaatatttaatgaaaattgttttgtcgtttcctttgacatctgtattaaagattgctaattgcctccaaaatccattttgtccctttcctatcattatatatttccccattgttatccatccatagtaaagatagcatttcctgggttcacatgttgctgatgtggccctgtgagcaagttttgatgaattggatgtgagtagaagtgagctgtgcagcttctagatcatgcccttaaagggaagccacatgcccgctcattcccctttttcctgctccctgctggctagaatgtgaacagggttatgagtcatctcaaccatgtgaaggagggtgatggaacagggatgggagaaggagcctaagtccttgacttctccatagactagagctgctttgcttaggcgagaaggaaataaacatcagcatcagatagtattattctgtcacacttagccaaaactgtgtataaaatacattaccatgctgacagaattcaccatttctgctgtgtttttttgaggtttaagtttcaaatttgcataatatgtgaaggcattttcatgtgaaataaaacattattaactatatcttgttttcagagcaaccactggattcatgctaatactgcttttatattacagttattcagtattaaaccattttgtgactatctgtaactgttagatgtatgacccatttgaggcgtaaacagagtgctgtctcttgataatctaaatttcctgtcttaaatttttgtgtctgctttgcctccctttctttgtcttcctccctcatgtctttccctcccctttctgcctttggctaatgtctgggccagtgctggtaaagtgctccctggccagtccatgggagtttaaggaccttaacagagaccaggttcctggcgttacttctgaacacacacacacacacatacacactggtaaaattcagttacttgcttggggagtttatgagtttatattgtaatggatggaaaaatgccctgtgctttgcaaccttttagactaagtaataacacttacaagaaattgtgagtgttatgggaaccaacttctgtgtgggagatgggtacgagggaaaaaaaaagtttcataatgatgaatgagaaattttcagaaagcattgtttggtttgtcattttcagtccagaaggttacttacgtcatttactctggggatggaatatagcttcactgaatgacagcatttggttccaagttatttagttatgtttcattgtgttgaaataccctacctttgccagaatcgttgtaaactatgtgtgaagctctaggtggggaaaaattgaaaggagcgccatattatattacaggaacaattcatgtcctactcttggtttcctttcaaagccctgtatttgtggctgtgctaataaattccatcacattcattatgcatagctgtaagtgtatgtaaataccacgcatcttgcattttgaagaaaaccagggagtgaacacacatagtctttcttgcctgggattcatttattttttaaaattcattttatatatgaatgagaaagttgagggaacatttcctttcataccaacatagaaaatcctctaataccacatcccctgtctcctggtcctgggagcagtaatgggattttctgggtgcatttgcatcatgtgtatcattgcttttctgtttatgttcagaagccttttctgccaaggcttccacaatcttctgaccccagcagcaggtacatccttgtagatgtcagtgtaagtctttatattatgaagagtatttgagagaatggtacaagaggatgaaagggtgaatggaagttgggggcaaaataatggagggctaaagaatatagatttgatcttacaaaagctgtcgagaaaccattgtgcattcttaagcagtgaagtggcaccatttaaaatgcacatgaatgattagtctaatatagtttgtctgacggcaaagactggagagtggagtaagaaatttgttggattttataccaaaaagctaaagtgtttctaggatagcatgtcttgtttaatattttatcttttttcaaaatggagatcatgttttatactgccttgttatatggttttattacttctttatgaatgacttaatagagcattttgtgtatgtggtaaatatttgtatgttcgtttctctgatcaagaagctaatggattattttgaagtatctactattttgtagcactacatgagttgtacaattaacttgagtccccataaacaaaattggggacatgctggatccatgtcatgctgtcatgctggagccgtgtcatgctggagccatttcaaactccagtgtgcttgacgttaaatttcaaaagtcaaggaaattgttgttaaggagcttagttgaagctatcttttcaagaatttaatctactaattcattttgtttaatttttaggaatttgtatgtcattaaaatactctcaaaaatgctgttctgatttgaaatgaaatacgagtataaaaattggggtcgatctttggtacattgtttattgtactggaaaatgaatgcttaacattagtctgtgatagtgatatcatgctattttgtattcaagcctttatatgttttcatcaggaagagtcaggcaaaagcagacaaaaatttcaactaatggcaaagcactttgtacctttaaaacaatttaatgaggagttgtttttactctaaaagctgaggcaagagatacatggcagtaaaatctgctattgttaatctactgtagtctcaaatttttattcattaatttatttattcatcagttccttcagtgatatttgttgagcgcctactctgtcctggcactgctgtagtcacagaggacaattatgagttactgagcctgactcctctcctatatggattagagagtgaacataaaatatcaggaaaactaaacagtttttacattttgctttgaatgtttttttactttcctctccgcttcctttccccccttctcttctttctctttccatcccaggtcctcctttttctcactatctgagagtcggaggaaacaaggagatgggaatttggagtggaagataggtttaaggagatagttatcccactctggttctaaattcttgcacaatatctgatatggcattagctgaagaaccatgacatgattgatttctttttttcatcccactagtatatgttacaggctctcagtgtgccaaccttgtttgagacacaaaggatttagtagtgaataacctagatgcagtcctcatggagcagacgctgtgatggagaaggtagaccacaaggaaatcagcatatacaaacatgctataatttcagttagtgataaatcctataaagaggaataatctaggataggaggagagaaaaggagagatgcctttatagtaacgctctaggtactcttctgattacactctaggattgtgtatatggctctctcatgtcctaacacttttgcaaagaatggggatatgtttcttttagtaggtctaagtctaaacaagagaaggtggaatgatgaggtctccttctcagtggctggagtgaagtggaagggtataggaggctcccctttcgtgaatgcccttgctgtctcatcagggacaccagatgaggctgagctgttagcttccctctccaaattgtcatttctgccaccttgaatcccacagttggcataaaaatcgtattttaagatgttattactataatttagttgtgaataggaatgggttatgtgataggcatcagggaagggcacaaagaagaaaggggcccagagtggggagattgcaattcgctaaagtcaggctgactctactccacagccctcctgacctaaggctgtgtttatgatattcagtcctcttacgtgacagaaatatgtggtacttggtttaggttccaggtgcatatttgttaactaaagttgccttgcttgggtggcaaaaaactagcctgtagtccattttacaagcataagcggtgaaggtgtttaagatttgactttgcatccatggtaacagtctccaccaatagtacatgttacagagccctttaggcctacaattgtactgtaaagacagactgtagtgacttgtctttcttatcaggaccccaccctacatggatccttgaagagtgagcaggactgcagaaggagctcaggtggatttgacagcttataaacctggagtttggggaatgctgaggcttcaggaagaaaacaccagtaagcttaagtttgggattcccactactcaggaggactgatgatggggaccaaagttaggaaagcagaggagttttggagaacctatgagttcaaaagggtgaagtaggaaaggtgagaatgtgagggagaaatgtcagagtttatttggattcttttaaagaataaaatagaacacagtggggagattcagagtcagcttggtagggttgagtttgagggcctaagaaggaagagagtgatggagacattataagaatggaagctcaagagaaccatgtaggtgctttgtaccctggtatggagaatttctgggtgcagagttcatggaccctggcgagtaagagctcaacacaagagattagttgctacttgaaataaacatgataattgtggcccagacagaaaagcctcctctttttcaaaggtcaagattgctgaggtacatgactcagaccttgcatagcagtaggaagagtaaccagcagcaaagcaataagttgtttatcaaagggtgctggtgactcagtcaggaggatttggaatagaatgattgatttggaagtaggttaagctaaccaaataatatgaatctcctatgtgtttcttaaactgattattttgaactcaagattctcttctagtgttgtgaaaatagtttgtgatatgaaaatgtatatgctcaattgctgtgaccactaagggagacaggtatagcaagagaaataatggttcagtctggaggggaagccatcccttctcgcccttcccctacgttgtgtggatggaaggtctccaagagaagcatctatgagattaggccagggagccttctgtttcagggccaccccattctgtgtggttttatttgtcagagacgctgatcctaacagaaacagctgtttcagtgaagttcaagcttgccatctattttcagtagaagcaggaagaatgtcagagacaatgtttgcattttagggcctttttataggagcctaagataaagctgtttaaaccttctgtcctctgtcatttaacttatcaaattcaagcagagccttttaatttcaacacacttaacttctagggatgaatagggcattgaacggattctataaacaagtacttttctgagcgataaacaggaacaaaagcagcacaaagatagcatgtcaacaaggtagggtgtattgtgagaagggcaaggcttgagagcctaatctatgctattctggggaagcaactatgtttgtttgtttgatttaaggagcagtgaagttacagagagcagaaaatgctgatgtacctgaaggccattattcacttctgtagacagtgctactgggtgagaagtgaataatattagtaatatatgttcattaattaaatgtagcttttaaaagaaaacacaagatggaaaagtgaaacaaaatggatagagttgtttgggtactaagagtagtagagtagattgaagaccatttaaatgggaggcagattttcccatgcatatctaaaaaggtcctagtgttatcccttcactccattttagatttgtttgtttagtttggccctgagtatgctagaacagataataacctcccagcaaatgtaactgagtgggaacattattttagttcactttcaaaagaagagggagatccaattcataatacccaaaatagagagtaccggttagttccagaattgaccagccatggaaagacatagaaactttgcctgttagaatgctcatcctgagaataggacctgagcttttagaggtgttagatgactagaaggccttagaaccattaaggcattttatttctttcacattcagccagctttccttgagcagcttttctatgcctcttgcatttataaatacttaaacatgttatcccattcaaaagtgtaatttgttgatacattggttcaacactgccattgtatatgtgtgtgtgtgcaccatatatgttcatattatagttgcagatgaataaaagataatgataaataataatataagttatttataatagtgtcaattggttaaataacttatacatccatatgatgaaacatttccatttttaaatataatgagccacatttatatgtgctggtatggaacaagcaaaaaaaatgttaagatgcagaaagatgtgtttagtatcataacattgaggcaagcagagatacacacagatgcagacttcacatctctgttcatttatatttgaactatgagaagaagtgagaagggatgaaatcatgaccttgaaaataagaagctgtttcttcctctgaggtaggagggaaaagaagttgggtaaagatatgaaatggtgaaacattagttgaggaagaaaggacaaatcagtgagcaaaaatcctgtttttgtttttataaacatttcaatcccgggcaatcttgagaaagccagggtcataggttggatgattgcagtactttcttgtgtgttcaaagaggaaagtccaaatgcgcatttggcactggcacttctgaaaagccctgacctttgtaatcaggttctttttctacctgccctgcaaagatttctttttgttttgttttggcagtagtgtttatgtgaacctgtacccttactgtgaaattttaacttactgtatagactggtttgtgtgatgggctcctacctattttaggactagaaaggactgattagatcatttgctctggcagttggcttttaggaaggtgaatgtgtaagcctttgaactgttcggcattgaaagatttatggatctcttaggcagttatatcaccatttgaatagtaggtgatagatagatagatagatagatagatagatatagatatagatatctgatctttaaaggaccaggattgtagaataatgttagctaggtatgtaaattatgttgtgtttggatgtattttgtttttggatgtaagggacagaacaagtacatggatcaattttcttcatcctataaatttggtaaaacagaaacaatatgatgtttatttcttattttgtatttgtataaaaaatgtaagtgttggggatcattgtctcttatggtacctcacaacccatcactttatatcctaccttcaatgatataggtaaaaggtatattttttaaaccagattttacaaatttccattaaaatgttgaatttttagtttttataaaactaaaattttgagtaaagaacaaaaaggaacagaaaatagtgaagaaacagaaatagagaacgaacttcctaggactttttaagcaaaatgaatattcaggctaatagttctatttatttcctagaagtagtacacagtctagtttttcttttatacattttcttgattttagggtataaaattaaaaaaaattctgaagaatttctttctgtgctctttgaggttttgcatttttatctggtgtttgtgtaaaattaattcaacttaattatgggaggggtttaaaacaaatgatactctttctaagctgggacaagttattttccttagtcactataggaacaaagaaggaatgagtggcagagtagaattgcttttgttgagcatgagctctgatatcttggctgtactgttcatttacacattacaaatattttcttagattctaagtaaatgttaccccctgcccccgaaccttgcttctactattttaaattctttctgctagctgcttctttctgaaccctaacacaggggtccttaacccctgggccacagaccgataccgatatcaggaactggacgtacagcatgaagcaagtggtgggcgaatgaaggcagcttcatctgtattgacagctgcccccacattgctcacatgaccacctgggctccgcctcctgtcagctcagtggtggcattagattctcataggagtgtgaaccctattgtgaactgtgcatgtgagggatctaggttgtgctgtccttaagagaatctagtgcctgatgatctgtcactgtgtcccatcacccccagatgggaccatctagtttcaggaaaacaagttcagggttcccactgattctacattatggtaagttgtataattatttcattatatattacaatgtaataataatagaaatcaagtgcacaataaatgtagtgcacttggatcatcctgaaaccatccccatgcccctggtccatggaaaaattgtcttccatgaaaccggtctctggtgccaaaatagttggggactgctgccctaacacatgtagggtaagtgggatttcacatacaggtataaagataacattttcattttaggaatatatttttccatataataataggaaaattgtgtatcaatgaagttttggaatggtttgagactctctatgtaagacagtgagtccaactgaaaggaagcatggtgtccgttgaatgaattttgcttcttatcaattcctgcaaagttctgatgatatcacatttgtagaaatgagagcaaagatacaaacaaacaaaacaaaacaacaaaatactacttgtcacttttgaggagaaattgaattgtttctatacatcttactttcccttcattatggtttttctttctttctttttttttttttgagaggtggagtcttgctctgttgcccaggctggagttcagtggcacaatctcagctcactgcaacttcctcctcctgggttcaagtgattctcctgcctcagcctcctgagtagctgagactataggcatgtgccaccacgcctggctaattttcgcatttttattggagacagggtcttacagtgttggccaggctggtctcgaactccttgcctcaggggatccaccccccttggcctcccaaagtgctgggattacaggcgtgagccactgcacccggcctcattatgtgttttgatgaatctgttaatttatgctccaacttaaatattcatatttacttttctcttcaagtgttttcaccattgttgactatatttaactgatatatgaagctagatttaagttatatctaacattttgcaaagtatgcttgaagcagaatggagttattgtataactatacataagcagaagttctatttgcagattcacagatgcaattatgaagttaagtcagggatagttgagttgaaacaaactttttcactatagttttgcttcctcatgtagccattttatttttttttacaaattaatctaaatctctagactttcatttttctatatcctatattcataaattactaaaggttttaaagtaatagaataggttaaaatagctgcatactcttcttagaattttgcataaaactaatcttcacaatctatttttctgaacatctgtatgcttttcgtatttaatttattgtttaaagaatttttgcggtttctcttgtgtttagagttacgtaaacagcatttgcattagattcagtggtaatatacagttgcattataatatacttactataaaaagtaaaaattattcatgatttttttgctggtaagtttgagtttttaacgtaaattaagttgccttaatttcataaatttcagtgcaatttcttagcatttttattgaagtgaagaagctatgtagtcattgtgccttatttttaaattgctctggtactttcagtagggaatattattaacatgaaccccatttcattactttttaaatgtccttctagttgccctaaatgtattgtaagtacctggagattttatgtctcaagccttctttttatcagtgtggatgtataatctccataaatgtcaattggtaatgatgatgagccattaaaattaatagcttatttgctaaatttgatgcttttaagtctaggattcgattttacatgattagacctataaatacattttattattacaaatttatttgtgtccattctttggaataatcattctgagaagtttctttgggataagttttcattaattttgatgaaatttgtggtgtttttgaaacagccactttaatattattgtgacatatttaaaggaaagcacatggatttctggaaaccagaattttaaacaagataatataattacatcttttgggaaaaaaattgtttattttcactagtgtgttttattccaggaagcaagtttcatcatcatgatttaaaataataaattgaaagacataaaacttaataatgcaaattagcttttgttggttgtgatgatgtactttgctttacgtgtatttatataacacctcggatacccaaaatatttattaaataccagcatctttctcacattaacctgaaaacttacagtagtcacttttctgcttgcctttattgccagactagtggcatacacaactgtcttttcttacaactaatgccttcagttatttcttagatatgagctttggtatgttacagttttcagaacttgctcaagtaaggcctcattcggcctcattgttcaactcagtggcttgggctctgttgcatctcccgatagttttttagaatattcactactctagttttcagtgacatcgtctgtcttggttcttctgaactacttaatgtgcattcctcttgtagggttctcatcctcctaaatgccggtattctccaaggctgcttcttttagtgtcctcaagcttcaagtcacccatggctactcatccttttcttctatttaccatcttcagttagtcccaagtcctagaatctcctctcccttaaaaataatctttgctgctcctccttgtcccctgttcttgcaactgtgttatttcatccttcccttactcatgataagattactgataatggctggccttctaatatcttgctccccaatgtgctaaagctagagaagtctttaacactttaatcctcttctgggcatttgcttttcttgcaaaagattaattatcttctttttaatctggtttattttacatatgccgtcttatttctcactactacggacttgtcttcttctcattttcatgccttcataattctaaaaacatgtcatgctaattctcccactcatctggaatcctacacacccagttcctgtcccagctcttccataagcctttagaccttgctgatttctccttttgctgaacctgtcttcacttttaatagcatgcatactgatgtatatatatcaaaaacccttttttttttaaacattacttagaattgtggtggagttgtcactaaagattaaaagtaggttccattaataagagaccatatactttttggtatccaccgcagcagtgctgggcccatattttggtgctcagtaaagttgatgattgatttaattgattaaataggtgatacttcaactttcaaatagagactttgtttttaaaaagtacttagctttatattagttgaacagctgtgtacatgaacatgtaaagtagaacttactttatgcactatttactcctgtagttctaaaaatactgcattttgcttctctttttttgtaaactactttctggagtgcttttattatttaaaaatgtacttcttatcatagggattagtgagaagtatttatgagagttctgttaatgtacctgtaaccttaggtatacccaggagcttaacattgcaaaaatcaagcttttgaagaaagaatagcttaagtgctaaatttgaaattgcctgcttagtagttttctaaatggtttagaaaaaattagttgacacgtttgtttcaagtgattttggagcagccaatttgttcgttttttaaaattaataagggcagtcaatttactaatttttactaatttcatggttttgcaaagagaaaaacaagatcagatgacatcatgcaattttttttttcttttttaaaaaatatactaagttctgggatacatgttcagaatgtgcaggtttgttacataggtatgcatgtgccatgatggttaactgcacccatcaacccatcatctacattagatatttctcctaatgctatccctccccttgccccctacctcccgacaggccccagtgtgtgatgttcccctccctgtgcccatatgttctcattgttcaactcccacttatgagcgagaacatgcggtatttggttttttgcttttctcttcctgtgttagtttgctgagaatgatggtttccagcttcacccatgtccctgcaaaggacatgaactcattcttttttatggctgcatagtattccatggtgtatatgtgccacattttctttatctagtctaacattgatgggcatttgggttggttccaagtctttgccattgtgaatagtgctgcaataaacatgtgtgcatgtgtctttatagtagaatgatttataatcctttgggtatatacccagtaatgggattatggggtcaaatggtatttctggttctatatccttgaggaatcgccacactgtcttccacaatggctgaactaattcacactcccaccaacagtgtgtaagcattcctatttttccacatcgtctccagcatctgttttttcctgactttttagtgatcaccattctaactggcgtgagatggtatgtcattgtggttttgatttgcatttctctaatggccagtgatacatcatgaaatttctttcagtttcattggaactgatagaaattgtcattgatattccattgtaatataaagccattaacagcctttcttcctgtgttttttgctaatcatcctttgaacagaacggatgcttttgtctttcctttcactactacattctaaaagaacaaagatatttttatcattcattcaataaagagtaggtacctacaggtgtacaaagcattttttgtagatttaaatctcaatctgcactgaaggagttcttaaattagggcaataatgtaggtttacaaaagacagtatgattttgcatgaaaatgcactgggaagtgctttcatagatgtataaacacattctgaagagagagaatttcttatgcctgacagggctaattacagataattttgtgaaggagctagcatttgaattcatcttcggaagcagttgggatattagtggctaaggatggaagtggagagactgtactgtgtgagacacaggggcaggagatacagggtgtgtggcattagagggtggggggtgggtacaaaatttggctctggagataagtgggaccatatctgggaggtgactgaatcttagactatggattttcttctcatattcattggacatgagggataattgaagagaattttcatgaccagaggtgtgtttatgaaaatttgtcagcactgttgagtataaattggagcatcatgaaattggtaatgaggacggtcctaaacaagacgttgtagtagtataagtaagaaataattgaagcctaaactgaagataatggcagtaggaatggcagtaggcaaaagaaggaatggacacaagagtgatttcaagagactcagcataacttgctgccatattcatttatatttccatgaatcctttttgtcattccttaagtacatattgtacatgtacgctattttccttcaatatattcagtggtggaagttaattgattaaacaattttagttttgtagcatcaaagtctgtttactcttgtgacaaataactgagttcaggtttgttacagaatttaaaagagttaaatataccatttgcataaacaaaacaaaagggaatcaacagtctcagtaatactgattaatgatttaggtatattgataaatcctcttatctgggttctatgttgttagttttattttccgtcacattttgtttttcttatctctgatgcacgtataaacataaagcacacaaaagctttagttgggagaatttaattctttctgaaattctattcggattttgagtctcactctttgatttctcaagttctgagtcatgagtgtttgggcataaaaacctgatgatctttttttaaattttcattagaaagaattaaacaagcaaacaatcagaattgcttaattgaactacatttgaaaccaaattatagaggtagttataattttatcaactttttctgtcctacgatctttcttattagacaagtctgataggctttgtaagcagtatatatgacaggttttcattgaaatgctgccagtgttgaagaggagaaaagctgattttccagaagtgagaaagacaaggaaacagtcacaattttttaagattagttgaggaataccacacttggcttcttgttattgaagttttttggtgtaggtctaacaataaaaatcttgtaatattggttccatatgtatagctgcttacttgtttcatgtaatactttcatcacaaaaaatatatatctaatatttctgtgataaattataaatacagtattggttttggtccttggaggaataaccttacaaacctttaaagacttttaattttaatttttattttctttccagctttattgaagtataattgacaactgaaagactagttggtaattgaaattaggactcatttttatagtcagacaatgttaatatttaggaggagaaatgatgatttattaataactttactcaaaataccattgcataaaaattatacatataataaagtgattaaggggcacccactttttatttactaataacttagaatattcagtaactattgtttgtaaaatgaattttcttttatccccatgtctgtcattctccattcttaaaatattttcctctgtgaaacaagccagcagggataagccccatgttttgtttgatctagttaatttgacttccttctgtttgcaatgtgttattataaggtgaaatattttctggagttgtttcttaatcattttattactcttccttcttgtagggaaatggcgtgccattgtttccttcttttgtttgctaagttacctgaattttatctaagccatagtttaggtgggttagctttaatagtatttgaaatactgcttttgaattaacatactgcttgtttactttatcctttaaaatgtactttaccatttaattcttttagtagcactgagacataaatagggctgaggatgattttatttacatttcctagataagaaaattgatagactatcagtttaagtaacggcctaagatgactaagttgaaatgagaaattaggactgacattaagatattgattttatttcaaacagcattcaagaagaaggttagtagttattttagataaaattaatatagaaataggaagcacaaagaataagcaccccacatttctgatagataccacatctaaatatcacctataagatcttcctgagtctagcccttcttacttttgtatcttcatctcacagggtttcccttgtttctttgctgcatccatgctgactcttttttccagtccctttgcaattgctctgcctccttttaaaacaaaacttttgcccttgctcatttctacttggagctgtcatttcttcctcttagcatcaataactccattttgctgtttagatcgtatcttcctcagaaaagatgttccagacttcactaagtcaaattcctttgcatagctcttggcacagttgtggtgttacttttgtgtgcatgttagttttattccttcctttatcccactgatctgagtttacagatcagtgggatgtgactggtctgtttttattcattcttgtgccctaggtgactaatagcatagccattgagacatagtaggtgctcagtaaatatttgttggatgagtgtttaggtttaagaaagtatctttgcaaacatttgcagcattatcttttaatatttatagctagccagtcatatatgccaatttctgcatctacctatttgtcctctttaactgtatatgccattagcagcaaagcagtaatatggatattactggcaggtttaagtcattgacaggtaagttaaaacaacaaacaaacaagaagggaagggagaccaagtatttaaaaaaacaaaacaaaaaaaaaggaaatggggccaggtgcggtggctcatgcctgtaatcctagcactttgggagggcaaggtggcagatcacctgagatcaggagttcaagaccagcctggtcaacatggtgaaacctcgtctctactaaaaatacaaaaattagccagtggcaggcgcctgtaatcccagctacttgggaggctgaggcagaagaatcacttgaacctgggaggtggaggttgctgtgagccgggttcgtgccgttgcactccagcccggagaacaagagtgaaactccgtctcaaaaaaaaaaaaggaagtaattttcgtagggttgtagaattacagaacttgatggaatactggggtttatctagggaaatctgtctgtctctcttttaaagctttttattttgaaactttacccagtttgcctcagtgttaacgtctgtagcacaatatcaatagtaggaaattgacattactgtcatccacagagctcattcatatttctctagttatgcatgcattgatttgagagtgtatgtgtgtgtgtaggccagtcatttttaagataatagaagtttataaacttgtttccgtgacttactcaaagccaccaggccatgaggtgaaataattggtttttaaactctatattgctgtctgcccaacagccatgaattctgtcataaaattctacagatatcagggattgttcattagcattagtgccagatttagactaatcctacaatattgaaagatactaactataccttttagctaactgtgtttataatgactcaaaaaatttagttctatcaacttggatctatgtcaaaaattagaattaaaatcctacttttgtttttgcccagcaggacttctctactattcagggaaaggcctaattaaggtttcctgaaaaatactctttaatcacttggattagaataaaaaagaaatgcttttaatcacatacatatctgctaatgcttttcttctagtatctaatggctttgataataaaaagtagtaataaaactggagaactaatggattttaaacatgtttctatactgtacatattataaaatatgtatacttagtgcattaagtagtatcttaaacttatacctatgaagtacttacggtctaaaattgatcaggaggcaaccttacttagtatttcctggaagtagcaggcatttactcctaacaagaagtacaaagaaattaatatagagtttgattcagcgttggagtctgatttttaaaaatcaaactaatttctgtcttgcaaataattatatgtaatatttcctactttttataattatagaaacatgacagaactataaattattttctgaatctatggaatattattgatttggtcagtaagttatctatcattggacataaacagaagagtatataggtttcctttgattttttattttgaggtttagaattaaagtcttatgaagtttagctatttcttcgctaaatgctttaagttatacccgtgcaaaaacctctgatttgtttttgtaatttcactaaaataggctagttggtgagctgtggtgtatgtcttaggaatttaaaataaaaataaatattaaactgcttaagtgaatctggttcacacacacaaaaaatccaggtattttaattttttaccaggacatttttttaaaaagattttgggccaagaaacttattttagtaacagcatgctatagtaaatgcaattggaaatgtaagtaattaattttattgaataaaataagagcaaaacatttcccaatagaaaatctctttgaattggcactatttccagcccaattgatttttaaacaggtataaattcatagcagaaccagcttaacttaatttgtagagctcctatcaagcaggtctcagggtgtacacgttctgtctttggtggaagtgttagtttatatttcatcttgaagccagtggacattttaaagtttctttttttcttctgatgtttacaaatatgtttctttagtaattttaggcttgctagtttgctatgctagcttatattttgttattagggagtgctgattccctgtttctaaatgtcccatctttttttctcactgaatttcttcacttcagaaacatgataatgggacattaaaatcacatatgtagtttaccattgctttattgttattataggtattattaaacagtgtacatgacctttcccccatctgatccctcgtctgtttgagaaagtagataaccaaccaggatttgtaaaggaaaacaataagaacagtgtttggcagcttgctggggcagcttggggtttatacatatttctttctctcagactttgagtttatgactccaccaatcataaaaaagagtaagcataaagcagatcttttagtagatattctgggattaaaaacaaatccaagatggtaatgaggttattgttttgcttgtgattcttggtagactgtatgtatgtttaaaaaataagtctcaaggtgctgtttgtagactcatgagtggctggctctgtgatgggagcatctactgagctggtagtatagcctcctgctaatcatctgccagcttctaagctgctcaaggagttaaatgactgttgatacaatttttaaggagtggaattccgttcttgtcattcagtctatgttaataatctcctatgatgaaactcaagtgttgggtatgtttgtttcctgagctcctcatagacagaatatgtgtttatatacataatactttttaaactacttctgatgttattataacaaggttgagtataataaaaccaaagttatgttttaagatttgctttatgtgtgtatttgtctgcttctatctgtttctccgttgcattggtttatccagatatctttctatacattcactgctgtgtcactgttgcccagatgggtgcgtgcaggtagctgaactcaataaatatgagctaagtgaatgaatgaatgttcctaaatggtgggttattttgtcttttgagcagctgacagtgattctgatcttacaatctaaaagctacaattaagttaaataatacatagttttaggaatttttcttaatttattttcagtgctcctatttttgaatatactcttgcatttttcctaaagtgatatttaaaaactgttacaggaaagcatttttatcagttatttctataactggtttctataaatcaaccaaataaacaatgaatacttatttttttgaaatatatgcaatgaataatacctattaatgctattctcttcttcagtgtactttaacctgaatgcatatttctgttggtggctcaaatagtgagatttaagtcatagattttgttatctacaaggaacagttattatatgtttaccatttgcaaaacaaaagaaatatgaaatatgactcctgccttcaagaaacttaagaatatagttggataaatatagtgtaatgacataagacagcttagtatacagcatgaaactggcataaagtttatattatgaaaacacagatcttgtcctgatggaatttcaggtgaatgagtacttggacaacttacctgtaaaataaagactacaaaacaaatacacagacaggtccttagagaaacacatattactaaagatgtgggacaggaatagtttaaagatcttttataagtttttgtattaagctaaagatttttaaaaataaattttcttctttaaagtttgtaggtattttaagaaaacatcattttatatgaaaaatggctttgtagaaggttggaaagttaacttaatattttcttttaaaatttatatggaagatacttttcatcttggttttataaggctcagttgaagacaagtgttagcactgaagcttaaatagttaagctggccaaacagccaaaggatgaagaatattttttaggaaaagttctgtgaacttaggttccttattggtggcttgttttctaattttataacatagagtggttacatatttgttacctacacaatgatagtgtaatgactgagcactcactgacgcatcaagggatcccaattctagtcttgattctatttccaactagttgtatcatgcaagtcctctgagttcctttacttatctaataattcatggagttacaccacagtatgtctaaggtcctttccagctctatgctgatatatacgattctacttcaaaagaagttattccgaataacctttgcacaaactcacagtatagtcttgagaaggatctcagttttgttttgcttttttttctttaaagcaaataaggacttttaaaaataaattctcattatgttttgtgccatatataattacatatataattataaaatgtatataaaaatgtatgattatatccaactatgatgaaattatgtttttccattaaattatatgtgtttctctgaacataggattttacttcacaaataagactatgtattgaactgttaaaagggctcactggacacataccagattctcaggattcttttcaagattatattgctagttagtgcaataatatcactggtaatgcagaatatctctacctacgaggtctggacatgttgcccaacctgttcacgaacgcctgggctcaggtgatcctcccatcttggcctccagaaatgctgggattacaggtgtgagtcactgtgtccggccatatcacagttttttgaggaaaagtagaatctttaagaaaataagtgactaatctttctcaaaaatttaatctggtaaaatttatttaggtgacatttgaatgtattagcagaaatttacttgaaaagttaaagtttcctttcatataatggtattctattggatgtatgtatgatgtactgttcaacgtactaattgacttaaatgtttagtttggtgttactcaaaattaacttattgctatagttagatagcggtgagtgggcctaaaagagcttgttcgtgtccctgtgcagctcaataacagtagtctagcaattcatatggttccatttttagttttgtaacaaaaatgaattgcttaaaaaatttttttaagttttggaagcaacaatgaatgttttacacaaatcagcctcaattaaatttctttaattctggtaaattaagatttagttttctaagtattccatattattgaccagtattttaacagttttcggatatttttgccatatctcctttttgtgcatttctatccatcaatttgccactgaaaattaaaagtaacctgttgcagggtagtatttcaatgaaaaaaaattaaaagtaacttggtatgacatgcctacttcccatggcatgtctgtgttctttgagttggttttcagccagctatttggcaaagcttactggggggttatgactcatcatatctttgtgacctttaaaaagaatatccacttgctgtaacagatagggatctcacacaatttctgttttttttttttttttgaggttttagtattaggtcacaaacccatataaatagttaccacttctatttttgttttgaagtggagttttatgaatatttgagaatatagacagcttcccattgaggattgtattcctcgtccagaggtttcatttcagtggtaaatacggttaagtttgttacaaggtatttacatgagtatgtacagaagtgtattcatttatgcattaattcaacacatactatatgtaatgacgtcttaaagtgagaattaaaaatctctctgaatttctgagtttttaaacccagaatcaatttcattcacattgttctttcttgagcaaaatgtcattttaaagtgagaattaaaaatcccactgaatttctgagtttttaaacccagaatcaatttcattcatcttgttctttctttagcaaacttttcttctgtagagttccccatatgtagaccatgggaggaataggcactgtgggaacatagtggtttatgtgactggcttcctatccttaagagtaatttttttctgttttttttttttttctttcccttttctccctccctctctttcattctttcattcttatttcttaagaatcatgcagtggagatacgtgaatataattcaaggtaataaaagaattaatgtcctactactgatggtggcaaagtggtatgcggcttcagagaatagagtgattaattccaatttcggggactggagatagtttcactaggagatgaatggattttgataaacacccatgtgagggaaggctcttgcagcctgaagccgtaagacatgtaaagggtttttaatgaacctggcagttgagggaataaaatatagtagtataagaatttgagtcatcggctgggtggggtggctcatgcctgtaatcccagcactttgcgaggccaaggcaggcagattgcttgaggctagcagtttgagaccagcctgggcaacatggcaaaaccccgtctctactaaacatacaaaaaattagctgagtgtgatggcacatgcctgtaatcccaactatttgggaagctgaggcacaggaatcgcttgaacctggaaggcagaggttgcagtgagctgagatcatgccactgggcatcccagcctgggtgacagggtgagactccctctcaaaaaaaaaaaaaaaaaattgggggccatatgttttgaggagagatgtaataagaaatgtggctgggattttctcgtttggcctggagagaatgaatgtcatgctcagaaatgcgaactttataaaaattagggtaccattggcatttatttcaggaggtaaatgaagtgatctgacctgtgctttagaaagatgatggtggcagagtatggaaaatgtgttaaaggtgatagattggaagcagtggaaccaataggtggccatgggctattgtttggataagtgatggtaagggcctgacctctcaaacagcaactactgtggtggtgggtatggaagttaccatgcagtgaagaagaggaactgataaatataatgttgcttactttttttagatggttggtatggagggtattagagatgggatactctcccactgtggagtaaggataaaggaaggctgttctactataggggaatatataaatgaattcaaggatccttaaagatccttgaaaataaagaggaggtaaaaactaaagagaaatagaaacaaagaatggatataacagatgttgggagctggtgaactttaaggacaacagtatccaacagaagtatcatgtaagtacaggtaattttaaattatctagtagctatgttaatattaacataaaaataagcaaatataatgaattttaacaatctattttatgtaacctaaaatatttaaaatattatgtcaggatgtattcattataacaaattcttaatgagatattttacatttttttttttttgagacagagtcttgctctgtcacccaggctggagtgcagtggagcgatcttggctcactgcaacctccacctcccaggttcaggcgattctcacaccctagcctccctagtagctaagatcacaggcgcctgccaccacgcctggccagtttttttgtatttttggtagagacggtgtttcaccatcttgcccaggttggtcttgaactcctggccttgtgatccacccgcctcagcctcccaaagtgctgggaccacaggcatgagccaccacgcccggctttacatttttttaaactatttgaaattcagtgtgtatccgcatttatagcctatttcaatttagagcaaccacatttgaagtgcagagtagcacacatcctgagtgaccaccatttgggcatttgagatttaagaagtcaactttttaaagtcctctatgatttttatgtgtatattaaaaatgttgaagctaggcagtttaagtgtgcagtcagagtgccatgtgagaactaacttcataaagttgtagcctaagagaaaagcacacagactcctgagtgaacagaagaaacttactctcgacattaccctaaaaatcactcctgtaattgagtgtcttgttattttcatgaactgtttccagttgacagtattattaagtcagcaatgtatttttgaggggaaaatgtaacttaaaaattatagtgaaaagataagtgaccccttcaagtagtataacaaatttaagttcattctattatctttaagaatgtgtacccggctttattaactttgttatattaatcaacttccaaattattttgattttctactaagaatggactgtctccttactcccacccccagttagaattttggaacaaataattaaaactattacttcatagatttcgaggatagagagtggggctcaagtgagccacaactccctgtgccttacctgactttcgacttgagaatggtggaagttataaacattgctttgagttaggcttctttttactgacttttgaatcatgaggaggtaggtggtccactccatgaaaatgaactctgaacgtctttatgctacccttgacactttgaaaggagccgtatttaataggaaatagcacttacggaggagaatctgagacatgcaagccgccatacaaagataaatcaacaggggcttgaaaaataaattgcaggcctcataaattcacagcctctcttctaaaatactaagcctaaagaaataagtagaagttccataattattctacaaattgtgtattctgaatctcttgggtaattatcacaactaaaaattacgtattacaataatcacaaccagcaaattacctgaaattgcttgctcagtgaatatctttcagtaaccaaaatttgtacataaaatgactatgcatgagtgctatttataatgagcacttgttaatattggctgtgtaaagacttctccgatttctctaatttaattttcatcaacactacgggtttaaatagtacctgcttcagtatctaagcaaaggggttttatttttagaataaagcagttaaattacactggtgtaatggaacactgtatcaaaatatatacatatatgtgtataaattctaagaaaatactatttaattcatatgttaatccctttgctaacttcattacaattttttccattaaatgaaaattaagtgtcttctaaatgttttatggagttcaaattaagtagttgaatccactgatgactataaaatgtgtgagctgcttcaatagttgtatcctgaagtacagattgaaggtgtgtctagatggagccagctgtacatcttcctcttctaagcttctctcccaaaacataggggcaagtaaatgatttttataggtagatgcttttaggatttgaatatttttgtcatgtattggtgttagctgtgggtccgttacaaatcccgtgggaccttcattggtgtgaacattagtgtatgggacttccagtctgatctttggcacccatgcaactttctcttatgtttttagttggcaactctggagaatactggttcctaagctcttttggctcacagatacctttaagagtctaatggtgacctagggattctctttaccggagagatgtacataagcatgtgagcgattttgcataaggccaaggaggaattagtgagactaagaagcaaactgggaactgttccagctggagaggacactggtgtctgcctgtttaggtaactgcaaatcttatgcatgaaagctacagtaaggaaagaggctaggggcaggggccgagtaatgaagaaaagaatctgacatccaggatgctgcaggtatctttggatgtatgagtttctccctggggtatttcagatttatttcatgttagtggcttgcttgtgagatttttcttgaaggttattacagtgattcagtgagttattgttggctaattgatgtttttatcatttctggtttaaatgtatatatactttcattcacgcatttgaacaaggctgttctcagtcccttttagaatccaggcaacttcctcatctttccccaccatcctgtggatctttcaggatttttccaaggttacagctcaaagtgtcgtgttgacaggctggagcttgtcaccatttctaaagtatgtttttgaatgaattcaatatccttgattcttatcccaaggagttttaacacactttttgtcattgttgttgttgttagcagtaggctagcttagaattgtaacttgcccatgccaaagcaacaacaacagattgcaaaggaatcttcaaaatgggcggtgggcaaggcccagcctgttttaggaagtcccctagctgtttgctgtaccacagtgaagaagaaagtgaagaagaccatttcatgtaaatgaatgcagtgatgtgggtaagcacatcaaagttcttcgtaaaatgaaaaaattgttcagacctgtcttaatggttaatgcttacttaaaagtctaaatgactaatttgactagccatttgttagaggattactcattttaacttttgagttccttatacttaaagtagctaaacacattttaaataatctgtaatacattaaaatattaaaaatatgcttttctcattaaaaatactatcttttaccacttttataagtagggtattttacacagtgattaagtatcattttagtttcctctacctaggttttataagctattaaagttatagaccatttatctgttaataatggctgctgctgctttttatgctattttcctgagtgcgttaaaggttatttttattaattagccaatatttcagcccacagtaagggtaaatcctctctaaaaaatttggttttcagcctgctcaactcacaagcgattaagaaaaaaacagttgtgagaattcattagtgaaatatttaagaaacatgttttaagtctcttcccgagatttttttttttaaagcatgctgagatagccttctctcactttctccctcttactttcacatgacatataagccaaatggatcagttctttttgacaaagtgtgcattgtactgtcataatttgttttcatgtttattatctaaattcgatttgtgtagcagtttggtaaaacccagattatatgtatgtcttttcactttgttccttctttcttcctgtggtaatttactataattgtattttcccagtaagtcagatcatattagagacattattccttaattatcagtaggtgtccttggaatattgcttagctcacaggaagtgggtgggggggtttgtgtatattttgttttcctagaaatttttatgtaattctaggttattgtcaacaacctgcttgtaaccagacaaaaccttgctatttcaataagtctaaggctagttgttctgtcaaacacgtgtcttgacagtgagtctcagtcatggtgatgcatcagaaatcatctggcgagctcttaaagcaataccagtgctttggtaccgctaaggctgtgattgaattgagccaggatgggccctggtaatggtaggctctacaagttcctcagatgattccgatatgcagctcaccttgggattcgttgtgtgttagaaggaactaggaagcatcctcctactcagtggttttcagccttggctcacattggaatcatctgggggaactgaactctctaatagccatgtcccttccccagagattttattgattctctgggatactggtctgcacatgcggatttaataaaatagccaggtgattgtaacatacaggtaggtttgaaaaccactgaccaccgcttctgtttttcagatgaggaatttgaggcccaaaccaaagagattaggtgacttgtccaagatccacagaaccacaactagaactcagatcttcagacttgttatcaaatgtttttaccaggacatcacatatttttaagaaaatgtgggctttggtatttcagatgtacttttaaaattatgtccctggctgcttagtctaaaaaacaatgtttattttatttattttaatactggaaatatgaaaggacatgactaagatccagccattaccttagttatgacataagagaccttaggagctgagaattagaaacgttcatgtatcctataacttgtccacattttctagaagcaaatcaggcaaataaataacccaactgaaattttcttaggttagattaactccatgtcactatttctatagcaggaattgtaaatgcctgtgtttataacatgggtcattctctaggagaatgtttaaaaaaacattttattgttttctgggttatagggtgaatattatagaaattttggaaatatatgagtataaataaaaaaatcacttgtatgtaatcttatcatccagagataacagcacaaacgttatgttgcaaatcaaaatggtgaaatgcctttttaatgcttgttatgcgggtgttttccagttgtgcatagaataactttatatgaaaggcactgaaacacacttcatgatgcaactgttgcctcatctatttaacaaatggtactaattgtgcctatttatgtagttaataaaaatgtaaagatagctgaaaagtagcttttccatgctctaatgttctcttacataacgtctacccaaaatatccttgtttgttttttcctgccctttgttttgctaatttgcttttttattttgataataccctcttaatgtttttacttttttcttcattttcttaactgcagggatttctttttttttttttttttgttctttgtcattatttaccatgtgtttctttctctcactgctattcattattttcccatttctatttttattattctggtcattgttaaacatttcatttttccatctagatactttgttagatcttgaaggattagcaactaattgtcatccttgagatctcatcttaacttttaatcagtattgatatttcttttaaaagaaacaagaccctttactgttctggagtccaacttaattagtcaccttttgtctttctctgtgatgctcctgccatccagaacaacagcataatgcctgaccccctctgtctcacacacatataaggcaggcagttaggagattttgacatctaggctgcagcttttcattgaaaatcttgcagaaaatcttgtgtttgcataaatgcatgtcactcaaaataagcagcaaaggggaaaaaaaagagtagctcttgggttttaaaagaggaagtttacttcccctacccccagtctcaatatttaacatctggttctgactaaagatggggaggaaaaacagacttaaatctccattcatcctgtcttaccaccaaacagtgtgatcactgatagcatttctatttctgttgtggtctgtatgatcagatgtttttgttaatgatttgtaagggaagataatgccttatatttctctgagtggttataatgtaacgtgccaacatttctaatctctagatagggctagatttaatcattatttaatgaaactttgaaggaaataagttattgctggacctcatgtgtttctgtcttatttcaaagagaaaacaaaaaacagaaacctttaattaatctactgataatatttattttattttaaaattttaatttatttcaacatttgaataagtaatacattcaaatgggcagaagtgaaacagtcttgtgagatacctgttttttaaaactccattttagaaaaggaattaactaggactttatatctcttcgttcaatataattttaaagaagaattgttgaaaagtagatatgttttgccatttgctgagaatattttgtacgttagcttgtctcttacaaaaactaaatgtgttcctacttctgataatgtatgtcaatttaaaatttggaatggccaaggtaagttgctctgcatctgcccttcatatggctcctgagcacagctcagtgactggcccttgcagtgcttctaccgttgtaatgggtaaaaccaggggaaactgccttgctcttgagcttgagcaggttaatcaaaaggatagagcttccacttctcattattctcctttctactttgatgggcagaataaggggatgctcatggaagagaaattcacacccatgaaaagcaaattgccctgatgtctgaatcacattacaaatttgaattaaattacaaacttaaatcaagtctaatgttacctacattgttgtacatgccatcagaaattcaaaagcattttattggacaactgaatatttattgaagtccagaatttattatgtaaacttggtggttagatttttctttctctttctctgtcttttaacctttattttaggttcaggagtaaatatgtaggtttgttatacaggtaaactacatgtcatgggggtttggtgtacagattatttcatcacccaggtaataagcatagttccccatgggtagttttttgatcctctctctcctcctgcccttcaccctcaagtagcccctggtgtctgttgttcccctctttgtgtccatgtgttcttggagagaactaaacatcaagtgagagctaaacaagaggatatatggtatttggttttttgctcctacattagtttgcttcagataatggcctccagctccatccatgttgctgcaaagaacatgacctcattcttttttatgacgtgtagtattccatggtgtatatgtaccacactgtctttatccagtctaccattgatggcatttaggttgattccatgtctttgctattgtgaataatgctgcagtaaacatatacgttcacgtgtctttatcgtagaatgatttatattcctttgggtatatacacaataatggaattgctgggtggaatggtaattctgttttaagtactttgagtaatcaagattgctttcacagtggctgaactaatttacactcctaccagcagtgtataagtgttcccttttctcagcagtgtataagattcccttcccagcacctgttattttttgacttttcaataatagccattctgagtgctgtgagatggttcccattgtggttttgatttgcatttctctaatgattagtgatgaacattttttcctatgcttgttggttgcatgtatgtcttctttggaaaagcgtttgttcatgttctttgcccactttttaatggggttgttttttgcttgtaaatttaagttccttatggattctggatattagacttttgccacatatgtagtttgcaaatattttctcccattctgtaggttgtctgtttactctgttgatagtttcttttgctgtgcagaagctctttaattaagtcccatttgtcaatttttatttttgttgcaattgcttttggcatcttcttcatgaaatctttgctaagtcctatgtccagaatggtatttcctaggttatcatccacacttttgtagttttgggttttacatttaagtctttaatcctcatgagttgatttttatgtatggtgtaagggaaagggtctagtttcaatcttctgcatgctagccagtttgcctagcacccatttattgaatgggaagttctttctccattgcttgtttttgtcaactttgtcaaagatcagatggttgtaggtgtgaggtactatttctgggctgtctattctgttccattggcctttgtatctatttttgtaccagtaccatgctgttttggttactatagccctgtaatatagtttgaagtcaggtattgtgatgtctctagctttgttgtttttgcttaggattgctctggctacttgggctcttttttgattgcatatgaattttaaaatagatttttttctaattctgtgaagaatgtcattgtggaaggaagataaatttttaaaaaatcacggtgttggcctggcatagtggctcactcctgtaatcccagcactttgggaggccgaggtgggtggatcacaaggtcaggagttagagacaagcctgtctctactaaaaatacaaaaattaaccaggcatgttggtgggcacctgcagacccagctactcgggaggctgaggcaggagaattgcttgaacccgggaggcagaggttgcagtgagccgagatggcgccactgcactccagcctgggcgacagagcaagactcagtctcaaaaaaacaaaaacaaaaacaaacaaatcacagtgttatggtattcaccataaaagatgaaaaacaaaaaaccataagccaactttctgatattagcctcagttcatggacttcggctatttcacattgagctttgggcgacaagttttgacagaaagtagaggttcctctcctgtggtcatgagcttgtgtttcaaggagttaatgttaagggtgcagaagtctctttcttctttatccagagaataagggggaaataaatacattttatacacacatactcaacatatatctatccacatatttatgcatatttatagtcattaatatgtaatatttccacatatctaactaagtatctgtttcttagataaaggaaattatatgatgtatacttgtgtttttggtttctttcgatcaacattatgatggtgagattcatccttattgctgcatattgttgtactttgttaattttcactgctgtttaggtttctagtttgtgactggttcataattgatctgcttattgatggacatttgttttgaataatgttgccattggctcacgcctgtaatcccagcactttcggaggccgagttgggcagatcacaaggtcagcagatctggaccatcctggccaacatggtgaaaccctgtctctactaaaatacaaaaaattagccgggcgtggtggtgcgtgtctgtagtcccagctacttgggaggctgaggcaggggaatctcttgaacccgggagacagattgcagtgagctgagttagcgccactgcactccagcccggcgacagagtgagactccatctcaaaaaaaaaaaaaaaagttgccattattcaaaagaaggttctgtgcatgtcttttggtgcatatatgcatgcatttcttctggatatgtggagtaagattgctgggttgttgggtatgtatatactctgttttggtagaatgtatgtatatatttttaaatgtagttttatgtatttatgtggtatctgttattaacattttttagtcatttaataatgagttgtggcttgttaattgtttagctcacaagaacgtcttgcctacttgtattggggataatacgataaggtacgcatagtttcagtggaacttgtagttcaaagactcaattctagcccctagttggtttgtgacattgggtctgtcacagctttaggtttgcagtttcacctttataagtaagatcgaaattaataaatgatctctgaggtgacttccatctgtacaattctgtgattatttcaaaatatcctaaaagactgttacagaagtatgctttttaaaaatatgctgctgactctggggaaacaaactgctccgtaaggttaatgtcagattgtatcttttttacagtaattaagtagtattaggttaggcagaaatctatttggatttttcagtagcaagcctgacttttagtaataggctagttcacataagaccgatattaaaataacagtttttttctttacatggtaacagttgtcaagaaatttcacagaaaatattcataattaaattaaagcactacaagtgtattacttactgttaagtaatttgatgaccgggaattttatgcccaaataaatctttgtattttgtgttacattttcagttgagttcattgagtcagatgggcatcatcagtcttatttttagtgttgcatgggtatattttaataattcattctttttctcttggccttttcccatatataaactctatttgcaagttattttcagagttggaaaataatgagctaatattttcatacttcatattcatagatgaataactagttattagcaggccatatttaatttatttttgtaagaagcttctttgtcacccttttttgcatttctttttcaaagtttgtagtgtatattgagttgttcttcacctgtgattagaggcatgtggatgtactgcaaagtggaacagctacacctcggattttcctgagagttgctcctgatgagttccttagcacccatttgtgacgtggaactggaagttataataggcattttagtgaatctttcatgaaattcagtttatttcatttaaatggatactttttttttcctgagattcttttccttgttcttcttgtgtgaaaatattaatgacaggtaaataatagattttgtgttaatggtgttatttgatgaactaaataagagtcctatgtcaatccctcccccttcctttttttttttttttttgttaaacattttagcatctcttaaagcatctggaaaccagaggtttatggaaggaacaccttcctccatcagttccttatgaaaagacttgcttcctgcatcccagcttttcagagccccttagttcattttacccttggcttattactccagggccagcttcccagagagtgctgggcatgcttgtgtgctccaccaagagttctgcctttcactttccttctctcaggtaccagaatgtagcggcatttcctgtaggattctgcagctgctcctttcaaatcactctctggccttgttctgtgatgttgcattcaacatcccaccacagactgtgtcaagatctttctcttttgattagaggttctcaggacaaaataagttaacagtgctcgactgacattttccaaggatatttatgctggtggaagcaatcaggggaggccctgattgctctttaattattaagttacaaggagatacataagaggaggaaaaatcagttccagaggataaagcatcttagtggtgcatttggagaaaatacttttttatttctttactggttggtcttacctttttaaatttgtttcctcctttcctgaccttaaggatagaactagacaccgcagatggattgtttgcatttaggaatctcagaggttaatggtgattgatggagattattgagggaggaactaatttgctcctttctcgaattaggcagaggtgagtcacacttagactgaacttgtgatgtgcctggtcctcttccatttcttgtagtgggaggaagcaaggaaagagccgccctctttctgacctttggcagtctgttgacccatcggaagaatttaatttttctcccaggatagaaatgtgggggtggactggggtgtggtgatgagggaattatcagtctgatgttgatatttacaaatgtgaaaagtacacgctgtcccaggactgggctgtcaaagactaggggatgagtacttcagggttattgagcaagagggatgacaaatgaaagtcccataagtagttgcccttgaggtctgacctgagagagaagctaactcactctaaaacaatgatgctccagtccagtagtgacgttagcagcctccccacttgggagggactgactgatagatatgtggtttgggacaacagagaggaattgctttcacaaatctttaagtaagtactgagatcttgaagatgctttagatgtagttttacctagaggcagagcaatgaaaaataaaggatcttttgagggtcctgctaaaccagtgctttcagacattaaacttgcataagaatcacctggggatcttattaaagtatatattctgagtcagcaattctggggtgggacctgagattctgcatttttaacaagctctgaggtaattgctatgctgatggtctaaggaccaaattttgagtgccattattagacacttatttaaataaaattcaaattaagattcaccactccgtgtagtttttccttctttacacttaaatatgaaaatgctgtaaacaagatattgtattattccttgtggcatatataaaatattatggaatgtacgtgataaaaatagatattaataaaatccaaattaaactcaccaactaacataatggaaataaatgctgatcagaaaccaaatgctaggccacccattgctatttacagatatccccatgtggtactgtattcatgtatgtgtgacaccagatgtctggaaaacagatttttgtgacaaattttgacacaggaaatttatcttgctccataaaacttaatggaaaaatgtaatgcttaacttcagtccattttaaaagaacggatttcagtgtagtccatagaatcaagtgggatttattcttgagagctgctaggagtctctttatcaagagaattacctaagacaacgtcagtgggtggcatggtatttgattggttattgataatatgtgttttgagtttgccatattcgctcagtattctattttagatcatgaataaaggatatatttctttactacactaaatatttatcagatgaatcatttctggaagtgagggaattaactgtggtattttgaaagagaaacacatcttttcagaagtacatcaacagtgtgatttctgaatgtgtttcaaacggttaatacaccaggggctgagactccgccaaagtagaacatctgcttctaagacataggcttctggtgcattcttctctgtgcactattgttttcttttgcttgttttctcaatttgttaaatctagattatatttcataaggatacagggaagaaacgctcctagctcatttgttatcttacaacagagaaatcttcaacagatcttttaaatttgggtaaaaatctaagaattcctaatgattaaattatgcctggtgataacgtattattgaaagtggttttctgttttgaactccccactcatgcagttctccctggtggaagcatggttgcacatgcagacctctgaattcctgagcagcatggatagaaggggtcctgtgctggtgcagtgggcagcctggatggggaggcagggtcctatctatgatgtgttcttgctcccctatcagcctctttcctgaatacacatcacttctatccctgtagtctgtcatattgccatactggtctacatctgtatgccttcatctgccaggcttgttgcctggcacgttcttctgcatttgctctgctcctcttaacagagttgaacacctctctttagttcctgtgttttggaagcaccttgaatgaccttagttgtacagttagagtgtatgtaattgtgtgtttttatatctaagtaaccactagactgtcgactcccagaaagcaaggactgaactggtctttatcttatatttccattacctaatgtagtggcagattttagcaggtcctcaaaaaaggttcattgagtgaataaactttattaaagtcgatggaactccatatatgttgattataattttcatgcatataaaatcaatctgaaaacagggaaaactgatagttgtgtaagtaagctatacttgtagacaaagaagcagcaagctgtgacatgagtaagatgtgtaagaaaatgtaaagattttctagtgctgctttgcagcctgatctttgtggattatttgtagcactttttcctctattttaatatttaattccttaagaaataattaagcaagaaatcattttaaaaaagtatacaatcttcctatcattttgatgtttaacagaaatattaaaatttgtttttaaaattattttcttatttttattacgacaaaataatcagtatcttcagagagaaataatggttgattctggtgcttaccatatagattaagtcctgcaagtcttgggtatagcagtgcatctattgaataaccatttcactaataacatttacacaggtagacaggtacagtgatctgttaagcaatatttttaaatatcttcttaaaagtattgtaatgaaaggtcaggtacagctggatgccgaaagaattacgctaaaaaaatcagtatgtatctttagtgttaataagtaggattattaatagtgcttgacttttaaacagagaccccattgaatagaactagacaagccaatatccaggatgatttcttatctagacatatgtcaaatctagttatgttaaattgtcttcagaaaacacataatttaaatggcagcgtaattaaaagacactgctgttaggtctataaacattctatgtctttgcttacattttaccacatacaatgtcaggggtttttctacctttgagaacttaaaacttgtagaaattaagtctattgtcagtagaaatcagtggattagcttaatggtattttcacagttcagttcattgtgtggttatctaagtaaatacgttttgggaattaattgcagtaaattccttctgattcaaatctgggtatgctgctttccaaataggatagtacaaattttttctaaaaacgttccctggttggtttttttatcagagaaaatacagaacttgtaaaatttataatttttaatgtaaaaactactttgtttaacaagaataaaattcttaaataagatgtttgatactttctacccagcttcatcactcatttctattctcagagagaaaagagccctatcctttcaagtgctagaattgagtatcgtgataatagtagtagattggtagctctaatagtgctaataacaattaacattattgaatgcatactctttatcagttttctaagctaattatttattgctgtatagcaaaccaccccaaaatttcgtggcttgatttaacagcaattattatttgtcatggttttgtgggtttaccgaatgttttttctgcttcatataatgttggttgggatgctagttcagctggaaggtccagtggctttactgtcatgcctagcatttggtacttggcagctgggaacatacttgggtctttctacgtgatttcttggacttcctcagaacatggcagctaaacgcaagagcatttttaaagaggcagaggcagaaactgccaaactttgtaatgcctagcctcaaaaatttatgtagcgtcatttctaccacattctattgagtaaagcaagtcacaggctacttcagtaaaaggggagggaaatagactcccctgtgttgggaagagtgccaaagattttgtggccatttttaattttttacagattgagctaagtactcaatcctttacaaaattagctaagtacttttacaatgtatgttttagggatcagaagactgagacttgaagaggttaagtcagtgtccgaggtcatctagttactaagtaccttaagctttagagcaagcttgtccaacccgtgacctggcccagtacagctttgaatgtagctcaacacaaattcgtaaactttcttaaaacattatgagattttttttgtgacttctttttttaagctcatcagctattgttagtgttagtgtattttacatgtggcccaaggaaaccaaaagattggacactcctgcttttttttttactttagagctggagcttttcaccgttgtaatatattaccttcaatggtataggcagataaatttgtccttctgctccaaagccaatatctgaggaagttttatttatgtggcgggataattgtctttgcagtcagtgagattataaagatatttggatcacattattgaggagccatcatgtggtaaaagtagcagtctctccaaatttggaaatttctgagttgttgggtgatatgaaaggtaaaatttttacatctgatgttatcctgcgtctactacaaatattagcacattgcctcaccaagagcaaataaataagtcagcttcttaaaccataagtttcccagtgggcatattccattctactacaatttatatttttcatatggtttcagtgttctagtgtttactattcattaacatgaaacacagattttaaattgcctttttaaaaattatttctgctgctttgtggttttctttgttttgagggccatgttattcatggagttttcattgttaaaaaaagaaaaaaagaaatgtcagtaatgcctgtgatggtaaagaacaaaataaaagtcaaggctttcaaatatactaattgaaagtttttatgcttatggtaatttgagttttctatgttagattcttggcatactgccttcaggatttcttcagtctaagactgaggcatattgaggaaagtctgtaagttgaaaatatcatatagcctattgtactttcatgttagctgtaagttgtgaaatggattcacagtttttgcttaaagcatatagacattttagcgccagagttatctagtctcctgctgatcagaataaaagtggtagatagccccatagaatgttatggggccatagaacgtatgtaccacaaccccctggttttatagaagaaggtttagataagagaagctttcactcttgttcatatcatggaatagtgtgaagggcagagttgtgtctagaaacctggtctgtcagcactgtgttttcttccactgtatcccagtatttccttaattagccttgttattagaaatgtaaaccaagtatccaagaaggtcctgtcaccaccactcagctgtagaataagttaaatccagcttaacttttgcatttgtgaaagtctgagacctttaaaaaatgcttagtcgtcattgtattcagaaagtttaagacttctatagtggttcagggaaattgtactgctgagaactagtaggttattacagccatgtttttctgtgattactttttatttttcattttgaaagaaaaaaactacctggcatagtctcaatgctttaaaaagacaggatttttctgtgagaccattgacatctaaattagtgttctcttgaactgttatcatgcatattaagacatatcatatatctaataaatggaagtaaaatggagttaattgaatcatctggttgggttcagctataccatttctttcatgacgttatatgacaaagaacacatgtgatgtgctaatttatctatataactattctgagatttcttgctcctaataataatttagttttagttgcattttttaggagactattataaaggaaggagataaatcatgaactagatttaaggatccagacccctccttctgtttaaagcaattttagactgtggatttaagtgtttgagctttctgttgtctggtttttattttaaagatatgaaattagaactaagaggtttttcttttggggaaggatatggaaaaaatactggtgtgccatttgtgaatgtactatgggggaaggactaacactttttagaagattggtaatcaatggtcatgcaagtggtttggcttgagtgccccagagatgccttctccgtttgaaagccgaagcagcgtggttgccagtggagcctttcagagtaccggagacattgcagtgagtctggaaatctattctgtctccagtaggcacatctcaggtttatcagagaacatcaatataatggctttttaatgacatttttgtttcttactgaaaatagggcaatttaaagaataaaagaaagaaaaaccatagtaattctactaaccagaggttactattgataatgcctttttgtgtatatcctgtatttgttttcctatttacaacacatcatctataatgtggtatttatagccttttaatttaatagaactaagattgtactgagcatagtatcgattaccctgcctttttcactctacactttcattttacccactttcccccccccgatcctctcacacagtgttatgtgtgagaatagatttccagactcactgcaatgtctcccatccttcaaagggccccactggcaaccagtctgtgttggctttcaaacggagaaggcatatctggggcacttgatatgcacttgcactaccactggttcccagttttctatgaggtatctatatcagatcatggctaaaatgagtgggaattgcttggcaaatttgtgtttgtttttatctttatatttgcacatactgaataaagataattttaatcctggggaagaggtagaaaaaatctcatgattttagttttctctgttagtattgcacgacataagcaccagagagatgacttttttcctcctttggttcatttgtattttacttgtcctattccaaaagaacagtattgaaatgagacacaggtatcaataaggaaaatttccagagccagaagaaggaaggaactgtcagggaacaattagtgtgacgggaaactatgttatgcttcctcagaaagtatgacaaatatgttacatttacttgagtttctggaaactgcacatgagggatatagcattaatttcctttgtcttgttggtattctgttttaccattcatgaagaaagaaaaaaaatgagagaaaataaaaggtctcagaactcacagagtaaagatatttttctaattgaaagtcaaacttcagagttgtaattctctgttaaagtgggttttggttaaaaattattttctgtaaactaattttataggctattcctatctgtctgttcattagcacagttttggggtcagcaaattattccttatagtttaaaaatattttttataatctttgaaattaacaaacttttatttgatagctattttaagaagttgttacaggtgtaagactttttcttctctaacaaagatgtgcgctgatagagctgaaacacaatatctatgtaaaataaccatggtgcccttcaaggaaacctttgtgccctggcagataaagtgttgtggcatgtcacatatgggaaggggtagggaaaagattccatgtgggtattttgacgtaaagctggtgcatttgagaattcaacaggctgagacatagaaacattgtatcagagtagggtgaacgaatggcttaactcacggaaagcagaccatttggatagcttggggagaaaacagaagtagtgtgagaaatggtggaaaggacactagaaatacttgaggagtttctaactatattctattgagtaaaaacaagacaaaagccatccttgatttgtcaaaagtgataaaaatggtgtaacaagtagaaataggattttcctgctgggtttggggtagaacttggaaaaaaaactgatcaattatgtctttttgagccatgtgtttaaaattaaggtggaggatcagaagcaataaatatggattaattgactccattcagattgccacttcactgttttatgatagactactgggaatagcaaataataagaaacttaatgtagatttgtttaaaaaatttgttactactgttgtttcaatgtcaagtttattttgcttgttgatgaaactggtcttttatcacataactctaggtcataaaagtatagtttgaatttccaacatttctaatgtttctttttcttttgaaaaataatcaaagaaaaagttctgctatgttctggttacttctgtatgaatctcatagcaatcatgattttccattgtgtttacagaactttcattgtgttttatcgtaaaggaatgaaagaatggattattttttcttttttgtctcaatggagtggtctacattttaaaggtttattttacaaaaggatacttgttacatattaggtttcatcaaaagaagttcaatactaaagataaagagttttccttattgaaatatatattgttaagcttttaaaccaaatgaaagtatgagtggtcatatttatactgtagtaggttttcataatagattttccggattaaaaccatttgttgaaatcatcaaagagatgttaatcctgctttagcattaatgcaaagttaaaataactgacattaaaaaaatcatttgggaagctttattgaatatattgagataaggtttattgtagtccttctcttcatgcatactgctgttacaattccaggaggtttcaaaatccatgtgaatgaccccattcaaccctcaaactgtccaattcctggcctaattcaccttcactctgctgtagctaccagttgcaggactagctgcattttggccagaactgcatcaccctggaaattttaaacacactctctctcttctgattgccctctttttctggttccatctcagctttattcccactgcattgttctttatctttggagctctctaaatcccttaaattcattgggtataggattctgtcatcttcatctttgtaatatcagtgcctagactaagcctggcgtataataggcactcagagatttgaagaataaatgactaaatgactgtatcaaatacttgcccattgtttgctgtttctgaattgtacaaggccatcatgataattgatgatcttaataatgtgagaatatgattctcttaccttagtaagagagccatcagtttattggatgatagttatatggaaaaagaagaaatgctactgtgataaatatttataattttaaacaagtggtaagtagaattaatgataaataacttacttattgaaggttttcaaaaaattagatgcatcagggtcttacctacatgtcttatgtatttttattcaaaatttttagaaatgaggaaacaggttaagtaaccttttctttatctttaaacaggctaaggatattaagccagtactaacaaacttaaggaccaaactcgtcaatatgtaagatactagaaaaattaatcagaatatattttgaatatcttgtggaagcttctcaaaggatattacattgagcatcataggctggcatgttatttcatgttttaagtaaggcatttgtaagttgtccatttaaatatatttattttagaaagcaaatatatttgtcctgtgaagagcatccttattttgagggatagcttcttgctgttaataaaacttcgtagataacatgttggaaagaataccacaggccgggctcagttggctcacgcctgtaatcccagcactttgggaggccgaggtgggcagatcacttgaggtcaggagttccaaaccagcctggccaacatggagaaaccccttctctactaaagtacaaaaattagccaggtgtggtggcatacaccctctggaggctgagacacgagaatcgcttgaacccatgaggtggaggttgctgttagcctagaatagggccactgcattccagcctgggcaatagagtgagactctgtatcaaaaaaaaaaaaaaaaaaaaaaaaagaaaagaaaagaatactacagagagatcaaagaatgcccaaagttacctctcccagtcagaattttgggtgtaacctccctagctgtgctagtggtggatgaggtgtttaacaaaggaaatgtaagatcttcctttagttgccagttcagtgtagttttttggaattagtttgctaaatttcttttaaagtgatcagtttagtatccaaaaagtaaaatggagcaagttgaaaaattgtcctgcctgtgtttcagtttaggttgttcctaggcgcactgctgacttctcttatgactttgggtagattcagtctttattggtatttgaacttttaatgtctgttgtgtactctccttagacacatttaaaactttaaagcatttgggcagggggaatgggtaaggatccagttttatttaagactgtcaggacccatctcaatagtagtatctattcccatgagagaaaaatgaaaggcaaggcttacatcagcctagtctcctcacttaggaatcacaacattcctaaggtcagaaacagtgtgaagtaagtctctgaacccattttggagggcagtacatcagaaatacagtggaaattgctctttagctggatgtgagtttcattttaagcaccactgtttatattctttatgtcttgcctttctttttatattgagtttgtttcaccttgtaaaattaagaagagcatgttctagcttttaaatgtgagaattgaattattaatagtttttgggtaaaagtatcacctcccatttcttctaccaaaagcagcacatcctcacagacttttcacctcactgaaaatggtcatttaaagtttttactaattcagcatttaaagctttttatttcctccttgatttataacacagctgtttcttgaatagaaaaaactcaaggactacatgcaatctaattagattacattctttgtgtgagtctcctgcatttagtggaggccactaatcaaatcttgatatattttctatttcttttatttatttattcatttaattcatcaagtcaagatggctataattagagcagattactcctaccacattgtattatgatgatctcttcatgtttttttgtttcatactatatgatattcattaagggtagcattgtgccatcctccatcaagcattatatgcttcctttgtgcttatgatgttgaccgtagcaaccttaaactgttaagacttgtttataaacggtgaagctccatcattccaacagagtcagcatgctaattcactctagttcaaatccacattctagttgaatccctgcaatgtaacttgacatttggagaaattgattcataccattttaaagaaatatgatataggtgacagaatccaggatgaagaggtaccttgttgcttagatgatgacgttgtggattcatttcacatctctctctctttttaatgtagctcttctccctccttggtttttattcctccctccttctttcttcttcaagcctcctctaatgttaacatctttggcagtttggccagtgttgacaactactttttgattatttggtattttaaaatatttggtattttaaaatgcttttattggccaggcgtggtggctcacaccttataatcccagtactttgggaggccgaggcgggcagatcatgaggtcgagattgagaccatcctggctaacacggtgaaaccctgtctctactaaaactacaaaaaattagctgggcatggtggcgggcgcctgtagtcccagctactcaggaggctgaggcaggagaatggcatgaacctgggaggtggagctggcagtgagccgagatcgcgccaccgcactctagcctgggtgacagagcgagactccatctcaaaaaaaaaaaaaaaaaaaacaaaaaacaaaacttttattgtaaaattatttattacaaacaaaatcccatgcaaagaaaatgaataaatgtgatggttaatggaatatatgtggaaataagtagcttctcttataagtgaaagaactgatatcgaaaattccatgtaaaattaattaaaattaaaattacatttgtaagattattgagtcttttctttctgggcagatttttatttagttagttgtttggggattgtttgggttttagtggcagaaatatattcttcataagtatcagattctttattaggcagtcatcattttaggtcttacaatgatgggaaatcccatgggcttagggaagattggctaagtatggaaaaattacgtaatagaaaaaattccatctacaaagatgtgtgattgtttcttttcttctccctatgtctagatggttagagatgactgtattcttggattgttttattttcaaaattgaaagtttttttttttttaaatgggtattaggctgggcacggtgtctcatgcctgtaaccccagcacttcaggaggttgagatggttagatcacctgaggtcaggagtttgagaccagcctgaccagtatggtgaaaccccgtctctactaaaaatccaaagttagacgggcatggtggtgcatacctgtaatcccagctacttgggaggctgagacaggaggattgcttgaacccgggaggcagaagttgcagtgagccgagatcacaccattgcactccattctgggcaacaagagcaaaactccatctcaaaaaaaaaataggtatcaaaggatgcatagtgggatggggaataaagaaagcacatactacatagcaaaacattgtaaacaaaaaagtcacagcgtcatataaaaaagaaaacgtattttctatgataacaaatttaaatgaaattagataccagaatagttttcagttctctttctcttttttttttccttttaagctccaacagaatgagtttgtcagttcttttcataccttggtgtcgattgcaacctctataaatatgttaaataatggatttctaagatgattatttacatatatatggagtgtgtgtgagtgtataagtataaagtaaatatatatattctggaatgtgtatgtatatatgcatatatatattcaactatttttaacaatatgagcttgagtttctttcaagactaaaggcaaaatgtattttttcattgccttattttgtgcaaaagccaaataaaattgtggtgatccatttgcagaagcaagaaaatagaagcatatacacattttatagtcaatcagtgagtattgatataggtcctggtgattattagagcttctagactataaaaaatgttactatgtttcttttaaagtttagtgtctgcatagccagtggatcagatacccagaatgggtgggtaatcactggcgttgtgtttcagactttagatctaacaagtaaaaattaaaaaaataaattggatatgattaaaggacaaagaatcaaggggatggagtgcagccaattcagaaaataaagaacagttggtttaccctaattatagccattttgatttttcttttgtatgtatcaattggaagtttggtaaaaattaaatctttagcccaattatagaaataaattcattgcagatttcctaaggtgactttatacttttcttaaactcaaatctttaaagtcggttgtagtttgtacgagccacaagtctttcctttgatatagtaaaacagtttactttttattttttaaaacaatatcttatatctaccatcatctaaattgaggatatgttaacataaatgacaaaatcatattgatatcaaagattcaactgattaagagaaattttacacttggattaggatgagttgtgcaaaagtggctgaatctaataaaatgatgtaacatttatgtatattataatgaattttccagattgtttatgggtacaggtcaagcattaaaataaggcctatgttatgccctcccccctttcatcaaaaagctttccgtagataagttatggaaataggtgactgtttttttttaaacttttttaaggaagatgaatttattgattttatagaatatcttattgcattcttcttattactacttttcccacttttgatcatgggtatcttttttctgtattcatcttatacaggaagttatgtatctcctttgtaaattagaaagagtgtcatccaatgattttattgtcaggtgcatattaaatgatctccttggtaaaaaacatgagttattattattatttgacagttattaaacacagatacatgagtaaatatggagcaaagaaacacaactttcaatgacaaaggtctgttgatacactgtatggttttatatgttgcaaatttgatgactttctctgtgttaatttccctctatatttttattgagtcctaacacacttgcctccactcacatcccaacacacacacatacacacacatgcacacacacacactctctctctctctcatatatacaggtgcacatacacatgcataatagctgaagcttcaaaatgaaaacatatgcagaatgtacctattgatttctggtcattctgagcaaaagggaatataaagaaataaagtttgtttgaaactggggaagttatttagtattttgtgttttaattgcttcttaactatctaacactagtagttttatgccgattaacgtaatattgaaaatttaagaaatgttagcaaggattataggtgattgatagtactgttttgtagtatgaagcatggtttaaatcttgtcagaatccccagaacttaacatggaaattagaatagagctgacacctgtatctccattctaaaccatttagtcatattactacaattttttccttctaaaacagacttcatcaagtcttcagaattctgaatccattaatccatttgactctccatttatttcttttctctttcattttttgtttttgagacattgtctcaccctgttacccatgctgaagtgcagtggcgtgttcatgtctcactgaacctctgcctcctggctcaagagatcacatcagcctccctaataactggggctataggcatgcgctcccacgccctgcttattttttgtagagatgaggtcctgccatgttgccgaggctggtctcaaactctgggctctagccatttggccacctcagcctcccaatgtggtaggattacaggggtgagtcaccacacctagcctgactctccatttcttatagcagtacctcttaatgaggaaagcacattagaattgcccacagagcttctaaaatatgcatatatctagaacccttcctcagaaaatctgatatttaggtaggagtggcaagcatgtataacaaaaactgtgcattgattcagatgcctctttatgtcatgtcccaactaaagtttcttactctgtctcatgttattttctcctgttaccctctgctctgctttcactgtgccaaaaatgatataataccaatacattttcattttatacttttgtattagtacttttgtacatgctgtttctactgcctgaaataccttttacttccctctgcatcctccctttctctcctctccaggtcttttatctgtcaaacaatgagttttcttcctagattctcctctgatggcaaatctttccttactcccccaggtagaaatagtcactctctcttttatgtttaccatttatatttgattattaattttttaagtgtccatctcttccattaatctgtgagctcagtgaaattatgtaatttatcttatttgtgtttatgttaaatgaatacatggataactaataagttgacagctttgttaggaatttaaatgtacaatgttttcataaactttttttaagggcagcattaagttgaggttttcgtgatcaaccaccaagacatacgttgatacatacataacattgtttgtcttaatatatattaccataaaaatttgcatgcatctaggtgtttatttcttatcttcatttttttcccttgtgcctacagacgaaatctcacaaaactgtcccttatcttcagtcacatgctggcagaaatcaaagcaatctttcccaatggtcaattccagggagataactttcgtatcacaaaagcagatgctgctgaattctggagaaagttttttggagacaagtaagtaaaaatcatttttatagctgtggatctatctttcaagggttactgtatcctccctccagttggatatggtatatattttacttgagtgttttgtgaatgtattttattatttttgataagcattttgattgattggtaatttttatagtcaccaaaggtatgcctcaataatgcaatagttttttagtcactaagtaaatattatacaatgttatttatttcatgagcattcattgagtttgttctgagaagcagaggtatgtaagagtctttatacatgagaagctgataacttcttataatttaatatgtacttaatatacaaaataaagggtagaagggcatagatactttaaaaaatggcataagtaaattgctgtgacaatttagaagggaatagttgctttgggatcagtgatcagggactgcttcctggaggaggtggtatgttaagcttggttaaggtctgaaatcgaggtgagagaaggccctggcaccctgatccagcctttctttgttttactgcatagagattatatatgtgtgaacaagatatgaggataatgttatcacaaagatgtagtctgttgcaaagtagttaaagatgtatgccctacagagacacagattctggtgagcttggtagataatggaattgaatatctaaggtcagcataatttatataaaagttgcaaaacttttgtcataaatgtctcagtaaaatgatcaagaatgagcatcaggaggcaagtggtttccccagtaaccttttaagaattacctttaatgagagcgcgtcctcagaatgtcctagaatgtaggcaaagccctggctgagtaagtaaggaggaagtgtgactgcttacatagattattgttttaatcttgtctcaaaggtctgtatttgtcctttaactgatgaaattagacataaaaattgttagtatacactttttttagtactttgatatgttgaactgcgatattggttttcctttgtttgtttttgtttttgtttttgttttttctttacaaagtactatagtttactatagtcaccaccaagattggaatatacctacatagagtaatgtacatttcattaagcacacaatttttttggcatccaaaatattaaagcctatttcccacattgtactaaaatgtattctgaattatttttaggcactaaaggagaaaatgccattgttgccattaacatggaaattctgtgttgtagcaatctagttatttataatgttcatatattcattcagaaatgaagaatttagaaaaaagtttatccttatctgaattagaataacacagacagctaagactatactaattaaatatttattaattgtagaaagcagaacaatcttgccaggttcagggtgtaggaactgagagggtttgtttcctgtagttgcagttcatgtattaacattgtaagcttagttcaaacagtcggtaaccttcaaaataaactttctcttaaagttttaagaaaatatataggacaaattgattatggtatttctttttgaaaactgaaaattctgatgagttataaaattgtttacttgtcataaggtcaataaaaaatggaaagattgctcacaggttttttttaagagaggagtttactttgctggtacttcaagccacagaaaattatgcatttgagacatctttatttccctttatttataaccacagacatcaaggggctgaaatttctgttcaactgctacatgagtgaaatcactactacatcaaatgagggattcttgaaatagtgattagatactttccctacctcccaagtcttttcacttttgtctgctgtttttactgaattgagaaagctgcttaatttttctttaacacttttaatttgtggatgactgccaaatttcatgctccttttggaacttatatgcattaccatagtcatacaaattaattattcctttattagataattggagaaagtatttttttattcttcctaggtttttaccttgtggttccataatattttattgaatgaatggacatatgcatgaataatgtgtatcctttcgaaaggttgaattttttttttccattatgctctaatactgtttgtattttcccaaaacttagttctcctgtgggagcatgcctgtcatttatctcactgttcattgaggccatgtaagaatgctttcatttagcccaaccagtgcctttaaacttgaaaacagcattctttcctaaaacagaaccattaatccattcatgagggcagcgccctcaagatctaaccacctcttgaaggtcctacttcttaatacagtcgcaatggcaattaaattttaacatgaattttggaaggggcattcaaactatagcactgttgtttttgaagacatggtagtgctaccctctctgctcagggcccaagcccagcagccaagaggcactgcctgccttgtggcccaaggggaacagtaacacatgtatcatggcaaatttgttgggggattctgtttatggtcaatttttatgcaaatgaatatattttaacaatgcagtcatgcttttcctttcatagtctgttgaccaggagttagaaatctgtaggaaaagaaaagtgacattattgaataaatgtgtctaagtatgttcagcaaaatgagaccaatactaaactgaatcttcacactctggaataataacttataatccagaaactttaagcatgaagctcgaaaaatatattactagcgttaaaaaaagaagcacatcaatgtgattagactctgggtgacagtcatttttcttagcgagtcaggtagcagcttgtgactcatttaagtactttttgacattgagaaaagtgattgattgaagtggtgatttataagattttagtgcactggtcacctgagcagtgcacactgtacctaatatgtagtgtagtcttttatcccttacccctctctcacccttccccaccacgaccccaaagtccattatatcattcttatgcctttgcttgctcatagcttagctcccacttataagtgagaacatacgatatttggttttctatttctgagttacttcacttagaataatggtttctagctccatccaagttgctgcaaaagacattatttcattccttcttatggctgagtaatagtccatggtgtaaatatgccatgttttctttatccgcttgttggtctatgtgcacttaggttggttccatatcattgcaattgcaaattatgctgctataaacaagcgtgtgcatgtgtctttttcatataatgacttcttttcctttgaccaggtatctggcagtggattgctggattgaatggcagttctacttttagttctttaaagagtctccatactgttttccatagtggttgttactaattcatactcccaccagcaatgtagaagtgttcccttttcacaacatccacgtcaacatctattgtttttaaagatgtttaacaacatctattgtttttaattatggtcattgttgcagaagtaaggtggtttctcactgtggttttcatttgcatttccccgatgattagtgatgttgagcattttttcatatgtttgttggctgtttgtatatgtcttttgagaaatgtctattcatttcctttgcccactttttgatgggattatttgttttcttcttgctgatttgttttaggtccttgtagattctagatactagtccgttgtcagaagcatagtttgcaagtatgttctcccactgtgtgagttgtctgtttactctcctgattatttcttttgctgtgcagaagctttttaattaggtcccatttatttatttttatttttatgcatttgcttttgaggtcttagccatgaattctctgcctaagctaatgtctagaagagtttctttgatgttatcttgtaggattttcatggtttcaggtcttagatttaagtctttgatccatcttgagttgattttttaataaggtgagagatggggatccagtttcattcttctacatgtggcctgccagtttttccagcacagtttattgaataagggtatccttttccaaatttatgtttttgtatgctttgttgaagatcagttagctgtatttggctttacttctgggttctctgttctgttccattggtctatgtgcctgtcattataccagtaccatgctgctttggtaactatagccttgtgttgtaatttgaggtcagatagtgtgatgcctccagatttgttcttttcgcttagtattgctttggtgatatggtctcttttttggttccatacgaatcttaggattgttttttctagttctgtgaagaatgttgatggtattttgatgggaattgcatggagtctggattgctttgagcagtgtggtcattttattcttcccatccatgagcaggtgatgtgtttccatttgttgtgtcatctataatttctgtgtttcagtgttttgtagttttccttctagagatctttcacctccttggttaaatatattcctaagtattttattttatttttttcagctgttgcaaaggggattgagttcttggtttgattctcagcttggttatgttggtgtatagcagtgccactgatttgtgtacattgattttgtgtccagagactttactgaattcatttataagatctgggagctttttggatgaatcttgaggcttttctaggtatatgatcatatcatcagtgaatgatgacagttcgacttcctcttttccaatttggatgcttcttctttctttttttttattggattgctctggctgtgacttccagtactgggttgaatagaagtggtgaaggtggggatctttatctggttacaattctcagggggaatgctttcaactttttgccattcagtatgatgttagctatagatttgacatatatggcttttattactttcgggtaaatctcttctatacatattttgttgagggattataaaggggtgctgtatgttatcaaatgctatttctgggtctattgagatgattatatatatttttaaaatttctgtttatgtgatgtgtcacatttattaacttacatatgttaaactgtccttgtatctctgaaacccacttgattgtgatgtattagttttttgttgtgctgttggattagttagctagtattttgttgaggatttttgcatctatgttcatcagagatattggtctgtagtttgttgttgttatgtcttttcctggttttgatattagcatggtagtggcttcatagaatgatttacggaggattccctctttctctgtcttttagaacagtttcagtaggattagtaccaatttgtctttgaatgtctggtagaattcagttgtgaatctatcttgtcctggactttctctgtttgcatttttaaaattactgattcagtctcactgcttgttattgttattgggtggcagtaaaccttacccagctctcctgcagttggtgaggctgatctcactcccacagtgctctgctaacaatgcttggtttagatccaggtagtctatagacagaactcagacctgccccaggtcataagcttctccacatagaaagctgccatggctttcaaaaagccatgcccctcttcgtcttcccaggcatggccaggcacccagctcctatgctcctgtctgcagcacacttcccacttgccgcaactcctccctccccattctgttcaagggaatttgttccactcgagattatattacaaaattcagttgggaggttctttcaccctgtgtcctttccctgagctcattggctgacttccagagggtccctgtgagatatattcaggaatagcttccctgggttcatgctggagattgggaagtcctgctgcggctcctacttttttatttccctaaatctgttccagctattggaagggtgaagggcttctccagtggcctggattttcagattccctggtggggatgtgtacttggaggcagactcttcccctctcgcactctgaggacttaggagtttttcacctgtctcacgtagtaggctatagcctcccaattctttcacagggtctgtggattctgttttcctaagttcctgtgttggttctttgggaaaaaattcacactgaatctctgcacattattctgtccttccaagtgggagaagcatgctgacactgcctccagtctgccatcttgaaaaaaaaaaaaaaacaaaaattagcattgagaagatttagacataaatttccaaacaaattataattcaattagaaacacagattctaactcttgaatcttcttacatagcctctcctctccatacataaaattctcttcttcaaatttaaattcatgctctgcattaccccaacaaccttctgattagtctccctatctccaataacaacctatcctattgttcttaggggaccagtgagctgtctaaaaagcagagctaatcattccagtctttcgcttgaagtgtttgcatgaatattaattctaggttaaagtctaaaatcacattaaacatcacaagctttagaaactttttcgctggcttctttttttctacttatcatttcggtatacttaactcatctgcaaagaaacaactcaatactgttcatatttcccaatgtgtgtctcattttttactcctcattgtctttgttttcgtatgttgcattcactgcttggataggcagtcacccatgctctatccagtgttgccactttgaaagctttactttagtaccctaatggatatccctactctgtgctgccaggtacctgagctcacatctgtcaaaatatattacagtgaactgctgacatgcccccatttctcaattgagaggtttccaatagactggaaagtttatttggaagcagagactgcatcttacttatttttgtgtttttgagcctgacacgtttcctggaatgtttaggcaataataattttttttttttaggtggagttttgctcttgttgcccaggctagagtgcaatggcgccatctcggctcactgcaacctctgcctcctgggttcaagcgattctccctcctcagcctcccaagtagctgggattacaggcatgcaccaccacgcccggcaatgttttttttgtatgtttagtagacgtggagtttctccatgttggccaggctggtctcaaactcctgacctcaggtgatccacctgtctcagcctcccaaagtgctgggattataggcatgagccatcacgcccggcggcaataattgttaacagactacatgaataattgcatagatggacgatgtctatcctctactctcaatttccaatgacttcattatatataaattgatctctttttaaatgatcagttcctacatttctattccttagatgcctctcttccctctttcttttcatctgtctcagaattttgacacctttctttaagttcagttcataagtccacttttctgagtttttctcattcatatacacccttctacgtgatctatgttaattactctatactttggttgctgttgtattttagacacatttatattgtaaaatgtgtttactatgtaggtctttcttgcttgattgcaagagtcttcaatgactttctatgcaaaagttggtgaaaacagacacatttattagagttattgtatgtcagattttgtgttcagtgctttcacatatgctagcctcattttcaatataatctttaaactactttgtaaatggttgttgaatgagtcttttacgtaccatatacattgtagacatttagtagttattagttgaatgtatgagtataggatgcaacttttctgccatttaagctctctcttcctttacttatgttctgttcttcagtcaaattggcttatttggctctttctggacacatcagcaattataggtttctatgtctttgcttatattgctccttctacttgaagatttttataatctctggcataacaattcttactaatccctcaaagataatattgctcataatttttcccattagtgttattactagatctcttcttaaacttcgctaagctctggcttatcttctgcatttactatttttatggttttattacaagtatttgtctagttgtcatacttccccctagactatatgctccatgaaatcaagcttatttattcatctttgtatttctaaagtagctcagcacaatgttttatatacaggctttcaggaaccattgtacatttaattcagatgagttgagaagtagaggaatgtgcattagcatgtgtatgtgtgagatggagcctgcttgcttgattgattgggagacagcatacttagggtttggcatgcaggctctgcagccagattatctgtccctggacaggttctgactgcaacatttactcactttgtgactttggggaatctagttggtttttctatgcatctttttcctcatttataaaatgtagatgatactaataatacctaccatcaatggttgttatgacggcttaaaatagctaaaccttacctgtaaggcacataaaactgtgtctagcatataataaatattctattttgtggaataattaaccaattgaaacctttaaaagtggtccaaattctctaaataatgtaatttacatttgactttgtatgatggaagtttcatactctgtagcaatctaaaagcaaaaaaaaaaaaagaaagaaaaagaaaaattttaaaaattattttatgtgtatcccgagatgaaggtagaattgaaaataagaaactgtcttggttaccacagggggaaaatggtttatttatagctcaatttattgcctctatgattgatttcctgcaaaagcaataagggccttctttggtttcccgtattttcctttcacttttaatatgaaagaaaggaaaatactttctttacctttccagcgagtgagatatatattcttctagcatattaactagctcagttttccctctaggtaaagaaaacacaacctaattatattaaattaaaagaagtggtacacagtagaaattaagagtttttacaatgaaaatttttagcagatactctaaagagaaagaaaaaagaactaaagtaggattcaaagaatcactagttaatatttctactagttagctacctccctttgttgcctgttaaaaaaaatttcaggtatctttatgtcaataaggaaaataaaaacttacatatctattggaggcctattttgttcaattcattgtaacaagatacaaaacaactaagatgccaattgtaattttctacctgtaagcaatattcagtttggggaagacaggatataaaaagaagataaatacttaaaatcagctctgtaccattagaaaatcacataaagaatatcacaaataataaattaatttactagtacatgcatacctcagagatattgtgggtttagtttgggaccactgcaataaagtacatcgcaatgaagtgcatattgcaataaagcaagtcacttagattatttttgtcttcctagtgaatatagaagttgtatttatactatactgtagtctgttaggtgtgcagtagcattatgtctaaaaaaatatatgtaccttaactaaaaaagaattgctaaaaaatgctaacaatcagctgagccttcagtgagttgtaatcttttagctgctggagagttgtgcctcgatgttcatggctattgactgatcatatgctgaaagttaaggtggctgtggcaatttcttaaaattaggcagcagtgaagtttactacatcaattggttcttcctttcatgtaatatttatctataacatgcaatgctgtttgataatattttactcacaatagagtttcattcaaaattggagtcagtcctctcaaaccctgccactgctttatcaaccaagtgtctgcaatattctaaatcctttattgtaatatcagcagtgttcacagcatcttcacctggagtaaattacatttaagaaagcacttttttgcttttctataagaagcagttttcgtctgttcaaattttatgagatttgcatcaatttagccacatatttaggttctacttctaattctagttctctagcaaattctacatctacagttacttcttccactgaagtcttgaaatcctcagagtcatccatgagatttggaattcactgtttccaaactcctgttaatgttgatattttgacctcctcccttgaatcataaatgttcttagtggcattagaaaggtgaatcctttccacgaggttttgaattttctttgcccagagctatcacaatatatgacagctatagccgtaggaaatgtatttcttaaataataagacttgaaagtcaaaatggctccttgattcatgggctgcagaatgagtactgtgttagaagacatgaaaacaacattaatctcctcgtacatctccatcaaatcttttgggtgatcaggggcattgccaatgagcagtactattttgaaaggaattgttttctctacacagcatatctcaacagtaggcttaaaatattcagtaatccaggttttttgttccatttgtagagcacaggaagagtagatttagcgtaattcttaaaggacctaggatttttggaatggtgaatgaacattgtgttcaacttaaagtcatcacttttattggccactaacaagagtcagcctgtcctttgaagctttttgtttttttaaataaagaacagaaatttatttctcatagttctgaaggctaggaagtccaagatcaaggtgctgacaaattgtctggtaaggacccacttcctaatttacagatggccaaacatctttttgcaatatcctcacatggtagaaagagtgagcaactatcagggggcttttgttttttctttttcaacctttattttggaggttatttagggggtacatatgcaagtaattgcatattgcatgatgctgaggtttggggtatgattgaacccatcatgtagctttgaagctaggtattgacttctccctagccctagcattttctagatagcattttctttcatcttaaggctgtttcatctacattaattatctgttgttttgtgtagccacattcatcaatgatcttagctagatcttctgtataacttgttgcttctacatcagcacttggtgcttcaccttgcacttttatgttagagagagcttcttttcttaaaccccataaacaaatttctgctagtttcaaactttacttctgaagcttcctgaattctcttacccttcacagaattgaagcgagttggggccttgttttggattcggctttggcctaacagaatattgtggctagtttgatctaaccaaaccaccaaaactttctccatatcaccagtaaggctgttttgctttcttatcattcatgtgttcactgaagtagcatttctaatttccttcatgaacttctcctttccattcacaacttgcctaactgtttggtgcaagaggcctcacttttgtcctatgtcagatttagacatgcctttctcactaaacttaatcatgtccataattagagacttgtgactattcctttcacttgagcacttgaggtcattttagggttactatttggcctaatttcagtgttgttgtgtcttagggaatagaaagtccccaggagagggagagagaaaagagaacagtgttggtggagcagtgagaacatataccattaagtttgctgtcttacatgggcatggttcatagtgcccaaaaactatttgtttcacacaaaaaatactgttttgaaactgaaaaactgggaatgatggcaacaatagatatgaattgtgatatgacagcaattggctagacctgtgtgccagctgtttttcttagataatctctcttctaattcatcacaatcctttcctggacatctttactaatttatattatatacctggtccccagatatttgattttttaatatctgaaagctatttggaaccactggactaatagtgtgtgcccctggatttatagaggtcctggtcttaatcctctaaacatttgttctcttctctgctggatgtgtctacttgggtcaataaagagagagaaggtctccttctagagcaaggatcttaaagccttgtaaaatagaggtagtatttctccctgggtcaaaggatatgcattatccattacaaaatatttgggttccttaagttctaggttctactccagaatcaaacccacagtgtatgcagatgtcacctggccctctttgcatcttttaggagaatttgtgtttagggaacaagggcaagaaaatgctggtactctagccactgctcttgctgtgagtaacaaagtcctttgactctgacccagtcctttgacagaaacccagtatcttctgccactatacatgaaactgtgataggccaacttcttagcttgcaagaagagtagaatctcattctttggttttttaggatcatgttctgctggtagagaaagtgtgacttaatagcaaagtaaataaaacttacttatattagtctgttctcatgctgctgataaagacctacctgagactaatttataaagaaaaagaagtttaatgcactcacagttccacatgactagggagacctcacaatcgtggtggaaggcgaaaggcacttcttacgtggcagcagatgagagaaaatgagagccaatgtgagatttattcactaccacaagaatagtttgtgggaaaccactcccatgattcaaatacctcctattaggtcctttctacaacatgtgggaattatgggagctaacaattcaagatgaaatttgggtggggacacagccaaacgatgtcattctgccactggcccctcccatatctcatgtcctcacattccaagacacaatcatgccttcgcaacaatcccccaaagtcttaactcattccagcattaactcaaaagtccacagtccagagtcttatctgagataacaagagtctcttgcacttatgagccagtaaaatcaaaagcaagttagttacttcctaggtacaatggggatacaggcactgggaaatacagccattctgaatgggagaaattggccaaaacaaagggtctacaggccccacacaagtccgaaatccagcgggccagtcaaaccttaaagctccaaaatgatttcctttgactccgtgtctcacgtccagggcacgctgttgtaagaggtgggctctcatgctcttgggcagctccaccccgtggcttcgcagggtacagtttccctcttggttgctttcatgggctgatgttgagtgtctggcttttccaggtgcatggtgcaaaatgttggtagatctactattctggggtctggaggacggtggccctcttcttacagctccactagtcagtgccccagtggagactctgtgtgggggcttcagccccacatttccctcccacactgctctagcagaggtagggctctgcccctgcagcagatgtctacctccacaagagccctgcccctgcagcaaacttctacctggatgtccaagcatttccatacatcttctgaaatctaggcagagattcctataccttaacttcttgacttctgtgcacctgcaggctcaaacaccatgtggaagctgccaaggcttgaggcttgcaccctctgaaataaaagcttgagttcaacattggccccttatagccatggctgggatgcagggcaccaagtcctgagactgcacaaagcagcaaggccttgggtacagccaatgaaaccattttttcttcctaggcctccaggcctgtgatgagagaagctgccgtgaagacctctgacatgccctggagacattttcctcattgtcttggtgattaacatttggctcctccttacttatacaaatttctgcagccagcttgaggttcttctcagagaatgtgtttttcttttttatcacattgtcaggctgcaaattttctgaactttaatgctccgcttcttcttgaaacataagttccaattccatatcatatctttgtgaatgaataaaacttaatgcttttaacagtacccaagtcacctcttgaacgctttgctgcttagaagtttcttctgccagatgccctaaattatctctctgaagttaaaagttacacagatctctagggtggggcaaaatgctgccagtctctttgctaaaacatagcaagagtcacctttacttcagttcccaacaagttccccatctccatctcagtccaccttaacctgcacttcattgtccatatcactatcagcattttcgtcaaaaccattcaacaagtgtctaggaagttccaaactttcccacatcttcctctcttcttctgagccctccaaactgttccaacctctccctgttatccagttccaaagttgcttccacagtttttgggtatctttacagcagcaccccactctactggcaccaatttactgtattagtacattttcatgttgctgaaaaagacatactcaaaattgggtaatttataaagaaaaagaggtttaatgggctcacagttccatgtggctggggagacctcacaatcatggcagaagataaaaggcacatcttacatggcagcagagaagagaaaatatgagagctaagcaaaaagggaaacccctataaaaccctcagatctcatgtggcttatttactaccacaagaatagaatgtcggaaactgcccccatgattcagttatctcccacctggtccctcccacaacatgtgggaactatgggagctacaattcaagatgagatttgggtggggaaacagccaaaccatatcattattaaaatcagtgtttagggggtgggtgcagtggctcatgcctgtaatcccagtattttgggaggccaaggcaggtggatcacttgagtccagaagttcgagaccagcctggcaacatggcataactctgtctctacaaaaaatacaaaaattagctaggcatggtggcgcacactttaatcccagctacttaacgaggctgaggcaccagaatcacttgagcctgggaggtcgaggttgcagtgagccaagatcatgctactgcactccagcctgggtgacagaatgagaccctgccacaaaacaaaatgaaatgaaaaacaaaaacaacaacaataaagtcagtgtgtaggtatttacatttcggtaatagactgctaatgattgatctttctattcttccttattttaaatgttggttattaataggaaatgcagtagttgtttttcttgtatagatttgtttttgttttgttaatctttaataacaaaggagttatttaaaatatcagtagttttattaaaaggactttttgatggatttaattatgcacaacaatatatgcagagttttttctttcagggttttagaaatgttatcagaagctctttattttttgcctcagtttatcttatacatctaggagacttcactcattggttgttaatttaattggctcatgttgagagacttacaaggaactttgttttattattgacttttttttttgtttgtaattctgagctctcattgctaaagggaggatcattttaaagccttacttaaacctctctttggtagcactttctagagtatgaaatttttttattttatttaatctgatttcagcatatcaaaggtatcttgcataacccatgagctgctgtatctcatgaatttatcctgtattggtgaactttcagagaatatatactgaagaacagttgtactttagaaagaaaagaacaagtattcattgtttaaaacctgaatctttctattttttacagtcagtggcttctaagtggaaaaatttttaatggaatttttacacattattatggattatacttgcagcttctcttcctgttcctttccactaatgaactttattttctaagttggaaaataaatagaattatgtacaaataattttatgactatagcaaatttattgtttattatgttccaaggttaggatgtgagaccagaagttagaaagcattaaatctatcatgtgaacaaaataattgagaagattagaaataatactaaagacactatttcctgtgttcctgcaatcttataaaaatatgattatagatttaggctgcagaatatgaatatgtgaaagatacttgtccactatacagagaagtaatgatggccccagctgcccatctggagtggctgctgcaaagatgctgcagtaggggaggcatggccagggctgtgtgctctatggagcaggtgggatctgggaacaggcaggagccccaccctcttccgagttggtggggttggagccccatgcttccaggagcagctgcagctatggacctgggcatccctatactcttgggggcccaggaagtccccctaccccagcaggcttggaagtgcctgctcctgctgtctggcctcaccctgctcacagtgcctgctctgggatggagcaaagctgtggccaagcctgggcactgttgtgacctggctgggtgtgcacacactcagggtggcgctgacatgccagccccctgccaccgcatccctttccagactttgggaccaaggagcactggagggaggccgacggggttgggctgagggtagctccgcatgggcctgcaggtgaccctccacagaaacagcctgtagatgacatgattggtggcagcaggaggcagacaggctcatgggtggaaaggggcaggtccccattgaagccctaccttcaagacagggacagcctacagcctcagggccgggctgtcagttcctggtggagttcacagtgggagtgaaaacttatggagctttttctgggcctgcccttggaccagtcagcacacacttccttccttctgagcccatgaaaaactccagacccagccagactcacacagacatcagactaccagctacaggaagaagctacccaatttgagtctctttgactccttgggatgatctgcctgcagaaaggagctacccactctgggtttcctgagtgctgttctgctgctcagtaaagctcctttctgccttcccaccctccagttgtttgtatacctcattcttcctggacacgggacaagaactcagggcctgccaaatggcaggactgaaaaaacagtaacacaaacagggctgaaatgtgcccaccctccacccccttcacgccccacattgtgggcaatgagaaggagagaagagctgtggccctttggggagcccacacctacaggctccctgagctaggctgtgaagccccatttgggagactgcagtttctggagtctccaagcttttgggtgccactggttcccctcctccagacacaggtgcccacagtggaagccacttgctgtgcatcagatccagccactggcttgcccagagccggtgcctgtgctggtgcctggagctgcccgccctgctacagcagccagtgtgcttggctgtgcgcagtggctggactccatgctcacttgttcatgcaccacttgctgctccgcatctgactcgtccttggcaggtgtgggatctgtgctggtagtgcatggtgagcgtggcccgccaggttgagtcagtggaatgagcccagcaggcctgagcaaaactcgggtaatggcgcaaccaatcacagaggtttctggctggaaaagtgacacacaaacaataagcgacagtagtgcttatctgcactagagacaaagtgttatgagctttttgacaaataaaaattatgcagcataaatacccagcatctgtgtctttatcgtgtcaggaattttcatgtataaggaagagtggttcaatctaattatgaatatccttggtaactatggttgccatcctatcaaagatgacttgctgtatggtgactatgtaaccagagtgttttgatatgctgtttctgtgggttgctggaaaacaattgcttttcccttattgatagaacagcaagagtaataatggtcccataagaatctatcttcatattcttaaaaaatggagtcatgataaaagaaggttggatttaaggaataactgtatacaaaatgtcaacagatttaggaatcacagcgctaatattttgtgtccataatgtaatcaaaacatatcaaatatgttacaaatatcctattatcttctgaacaaagcttgccctctgtttaaagatactgacattgaacatatcttagttgatcaaggtgaattttctgacaacatttacataaaattagaaatagagttgggctgctgaatatagaacatattttctttttgtttaaaatgaggatgacagtatatattcctgagctacaatggatcttaaacacctgccaccactaataccacagcaacaaaacaaaccaacaataaacaaacatgttgatttccttgtttgtattatggtagttactttgttcattcccatgtatctgatttttagtcttagatttttagtgtaatattttttaaaatttaaatatatgattgaagtttaatgtacatggggaaaagtacacaaatcatacatatagagtgagaaatttttatgaagtaaacataatccatgtttacagtatgtatccatgtttatctcctacccagataaagtagtaataccttgctgcctgcatcttggaagacgccctctctcagcgcgtcagaaagtcgcacatagtcaccacccagtagttctgatacatgccatcataaatcatacatagttgaaatcatactaattatactcttttggaaaaaactggcttcttcctctctttatgtttatggaattcaactctttacttgcatgtagcagtactttgttcattctccttccttcattgtatagctgtaccacaattaacctattcatttgattatttatttataaattacccagtctcaggtatttctttatagcactgctaaaacaacctaacacagaaactggatatataacatcaaggagaagaggtttattgggcccttggttatgcaggctgtacaggcatggtattagcatctgcttggcttccaggcaggcctcagagagcttttgctcatggcagaaggtgaaacagagcctgcatgtcacatgtggtgagagcaggagcaagagagagcaaggggaggtgccgtgcacttaaacaaccagatcttgtaagaactcattgtcgtcaggatggcaccaaggagatggtgctaaaccattcattggaaatatgctcccatgatccgatcacctcccactgggctctacctccaaaattgaggattacagttcaatatgaggtttggggggaacaaatacccaaactctatcatccagtgtttatatatgggtacataagtttctaaaattttagttttgttccatctatttgtttatgcttgtaccaatgccacattgtcttaattaatgtaaagagtacatacttgttaatgttcctagtgaagattaccttttttgttcttgactcttgcatgtcccataaagttcagaaccagtttttagtatctactacaaaaaatacctcctgggattgtttatttgagttacattaaatttttagactaatttgggaagaactgactctttataatatgaatctaccattaaagtgttacatacctttatttatgttttttatatctctgtgtatgggtgtatgttgatatttttgccttgctcatctattgttagctttatttctatttatttgggacttttagatagcattataaaaattaaatgtttaaagtttcattttctagttatatatagccaatataaaactacaactgatattttatatcaattttgtgttcagcaaccatgttcaattttcttatttcctatagtttaatctgtaaaatttttgtattttctacatataaagctatgtcataagcagacactgctttgtggttttcattgattcttctacgattatatacatttaaaagttttagtacatcttctattcttttagtacactagagcatattagacatataaaaagttaaaaaccatgaacaaatacagaaaatatatttttgaaatcacttataatcccttccacaagccagttattaaatttgtggcatctccagacattatagtttaacattggatcataaaggacaaaattttaaaaatactatttccatttagtagtatcccatgaacacttttccacgacaataaatatttttctgcacaaaattgttactagtgaacgtatttgttttcaaatattttgctcttataaacaacactgcatataaaagacttgtggatgggcctttggctgctatgtattttttggacataatttccttaggtgaaatccctagaagtagatgttcttagtcataatgtataggcttttgaaatttgtttccaaattgccttctagaagtgctgtgtaaattctcattcacaccagtagtatacagaagttcctgtttgcaaacaccctggcttctgttgatgttcaccctttgttgtatgaaatgtttttcattttttcctatcagttgaaactaaaaccctgtagccttttatgaactagtggtttcatgaaaatattttacctttttttttttaaaagaaatcattctcctcacactttctattttccattcttcttaccttttcttaaaattgcaggattttcaaattagaatatctaatacacttctccacatttacacaggagaaaacaagcctggaagattaagtgatttgtcaactactgaccagctgacacctttccagatttatttccctgcatctgattaatcccattgtctttgaaaagatactgtttttccaccgcatattctcactcataggtgggaattgaacaatgagatcacatggacacaggaaggggaatatcacactctggggactgtggtggggtcaggggaggggggagagatagcattgggagatatacctaatgctagatgacacattagtgggtgcagcgcaccagcatggcacatgtatacatatgtaactaacctgcacaatgtgcacatacatgtaccctaaaacttagagtataataaaaaaaaaaaaaaaaaaaagaaaagatactgtttttcaagactttaaagaggattactattgttttttggtagacagactagaactcattatctaataacaggattataacatagtcttatttatcatgttcttatctctcatgatattatatgaacagaactatcactttaacaaaaagtcattaatagatttctgtgtaatagataggtggtagtaagccatcaataaatggcagttcttactcttatttgaaataaaaagatcctgaaattatattattattacaggtgcatggctatccattggtcatgtattctattctttgtagattgacagttacttatacttgttcactgtattttaaaagcgattcagcctgcaacttaagtggtttataattgtaagggtcaatagaatatattgaaagatttttggattagtgaaaacttggagtttagttggcctttttattttctctctctctctctctctctctctctctctctctctgtctctctctctctctctctctctctctcttcccttttcttcttcccaggtctctgccagcaccctgaaatttctacatttgtaaaacaatttgctattgatattttctctcatttgcttcatctctaaaggaagaggtagtagaaaccaccactgtctttttgcagaagtttaaatggaggtgtgaaaattcatgctttctgggttcacttcctctcatatacctcagagaagaatggtagccacttagtcttaagaaagtttagagccttagtgcaacagtttagaataatctaatttttttgtttgtttttaaagactttgttgttgtactctatttctattcttcattcttgaaatccccttccccctacctctgttccccagccccacctcctacacaataatgggtgttttgctgaagtgatcaaatgagggttatctgttgcgcaaacactcatatatgaaaagttaacaaaatagtgccctggctccctaatccctattactaccactaattaagattccagtgaatgcctctttggatttgaggtttatcacaagtaatctgacaaagtttcatttacacaagtactgtggaaatgtagcttgtccttttgtaaattgttattatgaaggggtacattagactaaaattttcttaagttcatacatctcgtataactggctctgggaaatcactgagtgctcaaaagagttatgaattgaattcactgtaaatgctagattagaataatttttatagtaacagatgtggaagatgtctatttggcctttttaaaaaaactttatatgttatacacaaaataaatattgacaatttgaccactttacgttgtatactttatatacgaaacaaaaatgctttaacttcttcatacgaaaaataaaatttatactgttctgaagtcagtggttccctgatcatattttttttactctgagtatcatgatcaatgtcccttttgtgtgttgagtatttgaaactttaatttggaaaagaaaaatgtacttcttagacattagttttatggtaattataatgaagctggacataattgcatatttatacttcattgtaaatcaacagcttcctaatattcttaaaagtgttccttttttttttaaaaaaaacagcagcattttgttaaccttaatcagagcctgacgtgtgtttcttctaaatggcatctgatgtggtatctctcctcagttctctgtggtttcctgtttttttcatacatagagaaacactttttgaggtattaagcctcatatttttcttcttttaatggtacctgaaacctaaactctcttataaatacagcatagtgttgtcaacctgtctcaccattaatttatgccacttcccacagactgcttctctggaatccctccagcccttgctgtgtatccatcacccagctagcattgtccttacataccccactctagattctttagcattacaggttttacttctgtccctaaagtgtgatcttcagagacaaagatgttatctttatttctataattgtatttccccaacagtgccttgttttagcaatgaatagatatagtaggctctcaaagtgttgtctctagagcagcagcagcagcagcagcctcagggaacattttatggctgtcagtgttcaggccccaccccaatgctactgaatcataatatcttgggttgaggatcaggctatgttaacaagcccttcagataatttggatgcatgctgaagtttgacaaacactgctatagaaaattattgaatgaatatgaaagttgtacctttatggtgatatctcattgaagaggattgatatagcatggggccaggcacaatttagtttattctgcctgagtcttgtatttcagagatactggtaaaggaaacctaagatttaaatatttgctatcttataagaggatgttatcttataagagggacggcttttatgctattctgttgtaaaaattgtagtttaagttttaaaaactgaatgatttctttcttctgccgaattaggaataggcattattctgaagcaggaaggttaactaagaaatgcatcctgggtgtcactaattttcatggtgggaaagagggtaggtgagttggaaactggtcaggtggggataggttgagagacgtttccctagttaccattctgtgctcttctaaattttttgaatcatgtaactgcataacatgttaaaattttgtcgaatgatattcagtcagaataaagtaataaatattgaataaactcccatgatataaccattgtggttggtttaaaaattaagtttttcttttgtattaatatgaaaagttagataacgtatgtttttcatctctgcagaaaacatcagggttgtggcagaaatgtcttgatggctttctaccttagccttcttgaattggttgatacatattactcatttgtgcaatgaataaaggatttctattattatatggacccatcatcttatgactgtttttagaaaatgagaattaaatcttgattcattattaaataaccttgtatacacacatgaagaggtcatgacacataagactttgacctaataccttttttcagatatgtttctatagctatcttgatagcctaggactgtttgagagaaaattaatttaaatttttgtcatattcttagcaaatgcaaaataattgagttaaacagaacccactacatttgttctgaaatatgaacaatattctcaaatatttgtctggtagtacaaatacaattatattaattttattattgaattttgctgcttcaaagggaggtatttcttaaatgatacttgattcaattatttccctttttttccaccttgcacagaactatcgtaccatggaaagtattcagacagtgccttcatgaggtccaccagattagctctggcctggaagcaatggctctaaaatcaacaattgatttaacttgcaatgattacatttcagtttttgaatttgatatttttaccaggctgtttcaggtaagtttatacttgcttagtctatccattcccttcttctctctccctgtcttttctctctgtttctctctctctctgtctctctctcacacacacacacataaacaaacatatggaaaatagtgtcattcctattagtctgtaattttattggtatgtttggtcattgttaaaagtttagagtgagccatttggcttaagtttggagttatcagatgctgtgagcctggtggctgcttgttagctttgagaggatccatccaaaagagctttgttttaaactctctacttagtttcttactttattttgttgatcttttagcacaatgatggatagaatgcaacaactggaggtgggcatttgccacctagatctaaaatctttccctttgccttctgtgtttattaggtcaaaagggaaatagtaaacttagaaatatcagactgttctgtataggacagaactgtgtcctgtacttattttgtaaattgctttgcacattcaaccatgtgtaatgaacatttttcaaagtcaataaatattcttcatcagttcccttgtcatattcattcaaaatagtatgtcagtattaacaaagctctcttttgaaaaatttaggtcttttcccacattttctctaatgtaaacaactttaagatgaacatttttgttgtgcttattgtttttccctttaaattatcttccataattgttttcacatagcaaattagaagaaggtagcattatatggatactatcattttcttcttttgcgtgccttaatggaattatcttaaacatgaagacttgaaatttgtgttttgagattgactctgccactaaaatgtgtatcatctgtgggattcagttcaagtagtcacaaaataaaaattttctgcttaacatttttatgatttggtaacataaattatatagtaaatgaggtaaattgatcagactgggcttacttatgttctgatattattttttatcattttaatctgaagtaacattgattctctttgaaacatgctttcaacaaatatcagagtataatgttgatttcatgtttttcatgttacatgaacttctctgatttataattctgcttggcactagctagcaaggattggatgactggtttttgtaataaaaaccacaatgcacaggattagcttttaatttatgaaggaacccattattagaagagagattaactcctgtcaacagtacatataggatgtgaaaccccgcctctactaaaaatacaaaaaattagctgggcgtggtgatgagcacctgtagtcccagctacttgggaggctgaggcaggagaatggtgtgaacccgggaggcagagcttgcagtgagctgatatcgtgtcactgcactccagcctgggcaacagagcaagactctgtctcaaaaaaaaaaaaatacatataggatatatttcacttcattacaattacagaatcataattctaccttctatatagggtaagcaattacataaatcactgatgaaagtgtgcttttgattattttaaattttttaaattcgtgattattcccttggtgtatgtattacagtttgacagtttatgtttttttcaaagattttaagatatattttagaaaaaaaagttgtctgatattggtcattttataatggaacctctcctttctttaaaggtttctgataattttacagaatatcttatttatttaacatgatacaaagacattctaaatagtaagagctttgcttcttcaccttgtcaaggaagagagtaaaagtaatcttcctacattaaacctaactgctcattctaggaagtgagtatatttttttgtggtgagcctggatgactttttactgtgggtattaaatgctagaattccttgcagttatatattgaaagtatgagggcaacttaatgttggttaaacgattacctaaactgctatttagtatgtggacatattttcttataagctgttttactttaaaacagcacaagtcaaccttaatactctaaggaatatatatcttatttactttcactgggatgggaaaagaaagggctatttttaagtcaagctactgtgaaaagttttatatcataaaatgaaaatcttacctgggctagggaatgcctaatcattttaaaaacatgattacagaagcagctgaagaactcttgttagcccgtgtatttctgagattcatcattccatttatttctatgctgtaatcaaatgctttgaatataatcgtatgtgtgccttaaaatatgataaaattgattctgtttatagagaagtagatggtttaacttttgctgatcttttatttttataaaactttaaaaattaagtgattttcttaaatgtattatatttattaaatccttacatttatatattctgtatgaaaatatgttttgctaatactgtgtgactgcgggaacatacattcagctatagccatgatattagtagttaattggcagtgacttctgactaaattattgggagtggggtatttagcagaaagggaactgaaggtgagcaaggtacacttagaatttggggtctgaagtagagaaactagcagaagaaggagccagtgggggggcaggagatgaagttgagaattgcagagggaatgaaagaagtaaaaatgtttgcttcctcttggctttcattcttatatgcaggcagaacctgaacaaatacttgggagtcactggagggatcttactgtggtcaccttcctcatttcctcttcttccttctttccttctctttatccttctcttttctctcaaagtcacttagagatgctggaatcagcacatgctaatattagtcctggaaagaaattatagggattttgcttctcccttccttctccctggggctgttgttccccttttcctctatatccccactgttagaaaaaatggggtcactgagaaatggggcactacatttgggggtagcaggataaggacggagtattttagtagaatatcctattgactatggaatgtgtagcatcaatggaatagtgaggaaaatcaaagaagaggaaagtcctcagttgtagtaaagaattatagagagtgtctaggcagaccagccaaggaccctcttccaacttaagttgtaagtcagtaactggctcttcttgaaaatagtagcatttgggagaatggagggacttgtctcctttattcacttcattaatttctatagtcatttaaaagtatctagataattttatgttcttgtacacaaaaaaatttcttcaatctgaaaaacaaaataaaaaaaagttactctccaaagcactttgttttgccttttttaagccagtagttgtcgaaatactttaaaaagaaaaagcacataagtactacatgtttctgttttgaatgggctgcatacaaggaaaacaatacacagactcattctattacataaatatttttgcaattagaagctggccctctggattatgtactaagaaatggttgctgaatactgtagcagttggctcaaaactccaacttaatttttttacttgtattttgatctgtgcattggtgctctataaagtttagcattttttttcaaacactcttccactaatttgtgtggactttaatggaagtgacccaaatatttgtttggtatttctttcatccttgtccttcatagatgggtagaacaaaacaaaacaaaaactagggtctagaataacagttattgctcagttttttaaaatatatgctgacattttccaagtaatgtttaatgcagtttttagtcatgcattaggaagaaaattaaaaacatgcatttttttcaacctctcatattattattctctagagcgcctttcttgcccaattaggtattttagtgtgatggggaaataccccaaagatttttcttgttatgttgaaaaaggctaaaaaacttcattattactaaatcattctttgttatcctcatctcaagggatataatccttgcagaattctgccttgtaaatttgtaacttgcttaacaataatgaggaacaagtctcaaaacaaacaaaagcaggaactttctaccagtaatcatgtctaggatgactgctttaacagctttaacatggcaacgtaaaaatactttttttttcttttatgtagaagatttaataatctggcacatcagatagagtatgctgccagttccttggaataaatgtagcgtcagccttaaaaaaatcgcagagatgattcatccacacccttgagtaaagttgtctatcactgactgccttttttctcttgccctggtaactggagagacaactaatcagattaaagagagaatgatacagtggtacaaaccaaatacttctgtgaaaagttttgtttttatgtaactcacttttaaaccctaaacctttcctaagcttatagttctgtacagttaagccagatgtgactactgtagtgttaacactagccttttacacaagtcactatttagaggatctatctgttcaatgacaattatccctggctgattactattatctgacacttgcattggtcctggcatcccatgggtgagcaagacaggcatgtcccttgcccttatgtagcttatggttaatgtgtaacctttgccaagtcatgcaagttctatgatatggtttcttactgtgtaaaatgaagcagttgttaacagttaacagacatacagggaggtgaagaatatggcaagaggtaacaattttaaatacactggtcagagaaggcttcattgaggaagtgacatttggagacaggaatgagatggatatttgggggaagaaaattcaagtaaaggcatcggcaaatacaaagtctctgagggggaagagggcttttttgttcaagacaatagcaggctggagaagatgcagaaagtgggagagttatagcagatggagacaaaaaagggaactgctggggatcaaaccttgtaaagtccttctaagtgatatatgaggactttgacttttattcaaagttagaaggctttgaacaaaagaattatttcatttgtgttttacaatggtcacaagtgccgtagcgagaataggctgtgtagagaagagattttgtggttttcttttttgttctctgtattctcttcctgaaaaatctgttttctgcctaatcatatttctgtaaagaacaatagacttgaacgtctgctgttaagtaacaaaggttgacctaaaccacataaggtcagattaacttttaaaatatccaagataatgttaagtgtattaaatatggttcagtatgtaatcaaaatatttgatattctctagatactaatctcttttaatttttttattttttagccttggggctctattttgcggaattggaatttcttagctgtgacacatccaggttacatggcatttctcacatatgatgaagttaaagcacgactacagaaatatagcaccaaacccggaaggtaagactttttagcagtaatattatgtgatatatccaaagatgaaaaattctccatggtttgttcctaagtaagtcagcaatacccgctgatggcatgcttgggagggggctagaaaaggtaaaagaccaaaatggtgcttcttaacataatgttttaaattgatacattgtgcttactctgaaacttggtattcataaagtgaaaggggatatggtctcctttctgttttcatgatatccgtgtttatgtgcaaaattgaatgtatatatttgaatacttgaatactgtgctaaagaacaaataaatagaacagtcttatgttcattactttagggtatttttaagacattcatttaggctctctgataaatataagtacatatacatgcacatgaacacataaatatacatgtaagtttatgaacaaatacatgtatgtacataagcatatataaacctattgttataatcaaaaccaatttcgtgtccttgaaaacttttttcataatgcctcgtgttttattatagcctcagaatttatattttattttccacatgatgaaactaaatgagacttggagaggttggtcagcccctgtggctttggccaagaaattacaccttattaatggcaaatctggatccagaaaatctgtctcttccatggttcagtgcattttcccatgtatttcatctaaaaatgcattaggcccatagtaggcatttgtgctatggcaggcagtatgctgagtacggcagtagggatattagagacctgcttgtcagagtcctcacatttcagatgctattctggtattcattagtgctctgattttcatatagagaacattccattttagggatgaatttggtgctggtttttaagactgccttttttttctagtatcatttttatttggtttatggtgtatataatgtttgtactttataacatttttgttttgttttgttttgctttgtttttgagatggagtcttgctctgtcaccaggctggagtgcaatggcacaatctctgttcactgcaaccttcgactccctggttcgagcaattctcctgccttaacctcccaagtagctgggattacaggtgtgtgccaccacgcccagctattttttgtatttttagtagagatggggtttcaccatgttggtcaggatggtcttgatctcctgacctcgtgatctgcccaccttggtctcccaaagtgctgggattacaggcgtgagccaccatgcctggccaaaacagttttttttttaagtgcaagccaatagtgctgattttttcttctctgccattatgaaaatttccatatttttgtctttttaagaatttatatagtgtatttgaaaaaggagctagtgaatacaaaaacagtttggcttccactgaaatcttctatttagactaaggagagttagttctcattgtaaccatgagagaaggtcagttattttgcatattgacagtggtttagatgaatgattttctttcattcaagaatctctcatgaccagatttttccatagtttttactctcttgaatgacatcatataaagtatctttcttgctcttggcgtatgatgtgaaaaatgtgttgtggttggaattatgcagtcatacaaaatttaacatgtgagttatttgataaattttcttgtccaatcatagaaataatgagggaactgaggcctttatttttggttttgttttcttgttcagtatcatggagaacatgaattacaatattgagaacaacagccaggtctcattactatttggaaaagttctcttagtaaaaaactactgccctctgataagaatatcataagacccaccagtaaacttatcttcaaatgtgtacaatatatacattttatacagcttttttgtatatcagtcataccttaaaaaactagaataatgtcctctgagaaaaaaatccttctttccttcctaacttgccatgtaatgattttttctactaaattttaggtagctaatgatgaaataaataatatataacaaattataatgtgtaaagtatgacatgggtactaaagatgtgtttaggaaaacacccttaatgaataaaaaaaaaactgtaacaaatatttgctttggagaatatctgtgtttaacattttttttttttttatcttggaaagtatttcatgtctttgacttcatagtatagaaaacaattggatttacttcaaggacattttggctccttaggttgtgctttattattggggatccatctgacaaaatatgagttatggggtgaaggtagtaacatttggaaatctaagtgaagtattcattaggtgacaagagtggcattgaaccctaaaccacctcgtcaacatgaaagatacttcattttatatgcatatatatatttttttttaatttttttttttttttgagacagagtctcactgtgttcacccagcaggagtgcagtggtactatctgggctcactgtaagctccacctcctgggttcaaacgattctcatgcctcagcctcctgagtagctgggactacaggcatgtaccatcatgccttgccaatttttttgtatttttagtggagacgggttttcgccatgttggccatggtggcctcgaactcctggcctcaaatgatccaccttgctcagtctcccaacgtgctgggattacaggtgtgagccaccactcctggccccaatttgattaaatgaagcatgttgtttaagagagcaaggtgctaaaaataagccaaaaattcacttgaggttgggaaggggtagccaccagccaaagggtcagcagcaaattaaatggaataggaaaaaggtgcatgagaggaagaaattgttctaaaatgcccttggctcttaccagattgctggtattactatctcttatatacatgaattgcttgaaccttctgtataataatgagttttagaaacaccatcccaaaacaatgtttagagcaacagagaaggacatgaattaaaaatgtgagcaatttcacaagtatgtatttcagtatctactagattcttactatatgaataaatttggaattacatttaaaattactagcaatgcagatgtgtaattattttcttcatgttaatacactgtaaactttgctgagattcatagtacacagatttttaagattttaacttttgacttaatttgaaggaattttatcattaatttttttatgtaacattttaataatgtccttctgaattataatttatagtgactttctattatttttggcacttctcataatatcatagccgtaggtctctgtggcattattttatctgattttgattaagaatgccaatagttgacagattgatatcctattttcagtttctctagggatatatgtttttagacttttttgaaaagttctttccaaagattctatcaccaatataaagtttttaatatttaaaaatcacttctttttttaaattctagtttgtccaaagatgaaattacactctactactaaatatacaagttaattaaatccagtgactgcagccattatgtatgttaaagtatatctttcaagttacatttatagtgcttggtctatcaatgactaaagtatattttgacatacttgtgtctgccacatacatacagcagctcgaatattaaaatatagccaacagatttaagttggtttgtttttgatctgcttaatgggtaataaaatccagaaggatatcctgatagaaagattgaatgcagtacactcaaataaagagaaatgatctaaaatgaaataagtacatagatagctaaatgaatacataaatgataatgatggatttaaagccaagttgctgcctccttttgttggatattagtttcaagggacttgatttgatttatatttttgaactatcttaacttccccttgtaagatactgaatttgacatggttagatggcaggcatgaaattacctagtttgcacttttgagctttagggatgaatggcaggaatacctgaaagaaaagttactatttttttaacagttggccgggtgcggtggctcacgcctgtaatcccagcactttgggatgccgaggcgggtggatcatgaggtcaggatatcgagaccatcctggctaacgtggtctctattaaaaatacaaaaaattggccaggcgcggtggctcatgcctgtaatcccagcactttgggaggccaaggcgggcagatcaccaggtcaggagatcgagaccatcctggctaacacggtgaaccccatctctactaaaaatacaaaaaaattagctgggtgtggtggcgggcacctgtggtcccagctactcgggaggctgaagcaggagaatagcgtgaacctgggaggcggagcttgcagtgagccgtgattgcgccactgcactccagcatgggcgacagagcaagactctgtctcaaaaacaaaacaagcaacaacaacaacaaaataacaacaacaacaaaaatacaaaaaattagctgggcgtcgtggcacacgcctgtagtcccagctactcaggaggctgaggcaggagaatcgcttgaacctgggaggcggaggttgcagtgagccgagatggcgccactgcactacagcctgggtgatagagtgagactgcgtctcaaaaaaaacaaacaaactaattttaatgtctaaattacaaaggaatatatcgaattctaagcctgggtgacagagtaagactccgtctcaaaaaaaaaaaaaaaaaaaaaaccctaatttttatgtctaaattacaaaggaatatattgagttctacagtagaaactggctcagtttttgtctgaggtaggcaaattaaatttaaatttttacttatttattttatttttacattccaagagtgatttattttgtagctattccatgccatcagcatttccatacaccgcatcctgatgatgatggtaaaaaaatccctagtttacaatcttgtttattttcttatatatgtatctggaagtatttaaataaaaagaaatgatcagtgtttctcttgtaaattgataaatggagaagtacattgttgctaaaaataagttagaagacagaatatgaggagtattcaggaattctaaatgattgtttattcttttgcttggaagaaacctaacaaattgtttagtattgatttatattctgaatgtaattagatgtaattttcttatgttttgcagctatattttccggttaagttgcactcgattgggacagtgggccattggctatgtgactggggatgggaatatcttacagaccatacctcataacaagcccttatttcaagccctgattgatggcagcagggaaggattgtaagtatgagaaatggaagttggagtgcttatgattcatgaatttgaaaaataaagattgctttgtgatggcgaaaatggatagcaaggctgctttttatgttaagactgagaaataatggatgttccttagttttttgttcatctttttatataatcattttaaggtaacctaattatttgaaactatgttatagcaaatacatttcaacttcaaattacaacatgaatttttatctttcatatgataaaaacttgggacttaaaggtagttttaaaatggatgtaaaactgtttatatattaagagaaaattatttagaataattgacttctgtttcttcatataacccttagaatactagtttcactttttctttcttttttttttttgagatggagtctaactctgttgccaggctggagtgcagtggcacaatctctgctcactgcaacctccgcctcctgggttcaagggattcccctgcctcagcctcccaagtggctgggactacaggcgtgcgccaccatgccctgctagttttttgtattttagtagagacggggtttcaccgtgttagccaggatggcctcaatttcctgacctcatgatccacccgcctcggcctcccaaagtgctgggattacaggcatgagccactgtgcccagccagtttcactttttttattttgattgttagtgccagattttcttttctctttcttatctgtttctccctccaccccttttcttttctctctgtagatctttcctttttcacactaataataactccatattcaggactatatgttaatagctaagtttagtttatctcaagctattcctttttaaaatttaaaaataagttaagtttccctttgttttttagattaataatgaattctcccccactcactccacacacaaagtatggacaatctgttgggccccttcatagtaaatatgtctgattcttcttatttgttttattcacatgcctttccctttgtcctctccttgtattctcagtgcacttgatcatgctgctttttcttcccctctgccttgctggataacttagagatgctcgtgatcaaactcgctgcagtatgaattctggtagaaacctagaaggaaaaagtccaccagagttaacaaagagcaaatgatttgagttttacctttatcaaagtaattgcaaaaaagaaagaaagaaaagaaaaaaagtgatgagatttatacaaagaaaaattaggaatttctaaaaacctatgagcttttgggtgggagtggtggcttacgcctgtaatcccagcattttgggaggccaaggcaggaggatcacttgagcccaggagttcgaggtcaggctgggcaacatggcaaaaccctagctctacaaaaaatgcaaaaaaattagctgggcatggtggcgcgtgacggtagtcctcgctactctggaggctaagatgggttaatcacctgagcctgggaagttgaggctacagtgacaacatcgtgccactgcactccagcctgtgcatcagagtgagaccttatctgaaaaaataataataataccaacacacacaaaacctttcaataaattaattacatagtaattgtatggcaagttatggtaccaaatgtgtatttctctttctttttccttctaattttcataaatttgctagtgtcggttatttatacctttcttctaatgcatcaaagctttgtgtatagattttgatttaccatgattacagattttttttaagaaaatatactttaaagtttgaatttataagtagaacctatcaacaacctcctgataggttaaaaagaacctttaacctttcctatggtaccctaatcatgatttttgtaatctttaatttctgaattcttgctagaatttcttcatattatttgaaatgtgatacataaaattttatataatatttttttaaatggccaatttttagggtatataaaaaagttgcttattcttctttggattatcattcctcatttaatgtttgtcaaattttgtaacacacccataaggacattctaaatttgtatcatactcagatgtagtaaactccttttgctaaatcataaaaaaatcatctcactgatttgtcccttactatgtaagaattatctgtcctttaagttcatttttctggttttcctgggtaaattctaacacttaacatgtttgtagactcctcattcgaggataaatattttttgttattttaaagaatagatttgttatagttttaccctttaaaatatacatactacagtactatattcttattgttttatttaagaaatttagtatagaaagatgttaaacagaactaaccataatttaataaactgatgaaatacagcagtgacattaccacttttttcaattaaaaataagtatttaccaacacagtaaattttattttttaatgaatttttcaataacaagtacaacttctgatttaacacagcaagaatgcattattactacaacttttagttcagatttcagttttccctgataatagaaccttgtatctatagaccattttgtgtttgtagtgttaagtcaatgaaacatggaaacgtaacattttctaattttttaaaatgtgtatgtgcctgtgtgtctgtgtgtttgcatatgtgcacatgtgtttgtgttaggtgaggggaagatgggagaagagatatggaaactgtagaaacaggaataccacagaagtgtttgagtaacttacaagaaaactgtggcctttaattatatttttctttccatgtggtattaggcatggtgtaaaatgataccattattacctgtgcctcagatgaaggatgtaatagttgcaaataggtatatcttcaaagtgttttggaatacaacatgattgaccagtgaaataaattcttaacttatataagagacatatattaaaggtatttcattgaaaatggttgcttagtgggttaggctatattcattatgtatttcttatatgaaaattctacattttaagtgtcctaaaaacaacatagtaatttggaaacattgaagtaatatgttattgatatgttacatgaaaaggaaacatccaaatgtatgtttgaatatagaaaaatttgattaaatatccttaaatgcaattaaaacttgtatatttaaggtaataaagtttctgtttaaattcagttatctttatcctgatgggaggagttataatcctgatttaactggattatgtgaacctacacctcatgaccatataaaagttacacaggtaaggataattgctagaaaagtataattaaataagtatccataatgcccttgaaataaataagactctcttagtgtagttaaaatcatgcacaggtatttaatacaaaatatacttaaggaattctaagagtgtttaaggagaaattatattactttcttagattttttgatacaaatttatgctgttaaaattcttgctttccatatagtattggcatttatatgggggaaataaataaatccataagcaagtaggtggatgtaaggagagagccatagtttagaaagctaccaaaaaaagattagaataattatatgccttagattttagagtcaaatgggtaattgaagcctgttgaagataacaattatgtttttctaaatccattgctggcagcctcatagcttatgaataggaatgtaagttggtaaaacctttcttgagagtgatattcagtgattataaaaatctaagtgaaaatatcttttcactttaaattctatatatgtaatagatcccatatatatcacttacacatgcacacaaaaatctatacaacaggtatttactgtaatattttttgtaaaagcgaaaaattacaaaatactaagaactttagtaatagattaaataaaatagactactgttctcatactgtattgtgtgaagtcatgaacaggagggaggtagctctacatactcacatgggaacttctgcatcttgtactgtaaaataattccatttatgtaaagtacatgtaggtaacatttcatttggtcaagttgcattatgtacgttcaacttctgtaaggaaataattaattaattgctgtatatgaacatgtgagtatagtttttaaaagatcaaaaaaacaccaaactggtaagaagatttaactgaggaggtgaaaagggattgagcagtgagggaggggatgaagggagaacttgaatattttattttatattcagtctagttttaaaatattttatatttgagatatgttcacgccttgtgtaataagtaataaaaatctaagggaaaaaacaagagaagaattacagctttttttaagacagtagataataatttaccttataattctccagatttcctttcccatggtctttacattattatgtgagacatacacattgacatttatatgtacatattgtacgtgtaaatttaataaatgattgccttgtttttctttttttgagacagagtcttgctttgtcgcccaggctggagtgcagtgacgcgatctcggctcactacaacctctgccctctgggttcgagctgttctcttgcctcagcctcccgagtagctggcattacaggtgcctgccaccacttccggctaatttttgtatttttagtagagatggggtttctccatgttggtcaggatcaaactcctgacctcaggtgatccacccgcctcgccctcccaaagtgctgggattacaggcgtgagccaccatgcccggccatgattgccattttaaatttaatatatgattgccattttaaaagttatgtggtgatcctgtattttcaaatatgtgtgaaaggatacttaggaaagacagttcctctttataaagccattaaaaaaataaatctttggaagtaataacatccccttaaattactcataaatactcttactgtttaggttgcattgagatctgcatctttgattttagcttaatgtaattttttttataattgcatatttttcctttggacagtcataaccagtatcaatacttatctattatttcagggacatcagcaatttataacttactttgaattactttagttttatttcttctccatttttatgcattctctcgtctctttccttaagttccccacaaaatttttgtatattcacacatcataatagacacagtttatgtgtacatgtgtgtacctgcatgtacatgcatatgtatccatgtatgtttatgtatatgtatatttttctcaccaggattataatatattttagtagtctgtggactaaatattattatttatttatcctactccgtgccaggcacattgtagtcacttactgaactaaaagttgctttatttacccaaatattggtttcataattccttttctttgtattcctaacatcttttttcattatttaccaatttatttgtattttttcaaatttaccaatttatttgtatttttgtcacgaagatcttttcagtatttgaattttgaaaattttactgtgtcaaatgttttaagctaaaaacccaatcaatcaagaacattgcagttttaataaaatggtttttggttactgaagtgatttgttttcttgacagtgttagggaaagcgtatgcactttttagtcagaggcttaatttagagtttgaagcaaacaagttaaactgattaagccccaggcctaacttttgttaagttcaatatatcttcttgtgctttggagatgaagtgaaatagtaagtgtggaccacagtgcctggcatgcgggaagtgcttggtaaatgtttgtcacttttcttgcattcagggatttctaaagatattgaaacagtaaaatttaatgtttagccaagtatcatttttttttcaatttgacagttaaattatatgagcatgtggcatttataaaaaagataaagtcattttatattcctattttaaaaccatagattttgtcttttgagtcaccatgactattgaagcaagtcccttcctaaaggaacagtaaaggaaccttaaataatatgaatcattaagaagcatgtaagatagatgataaaagttcaaacctttttaaaatgaattttgtagaccaaattgtgattatcaattcaaaacatgtctcaaatggtaacaaaattctgacaaggtcaattgtgagatattgactgtgcgtcattttatttgggaaaatttgatactaacaatttgtgctggaaatacattaacattactttctccctcctccccaaattccaggaacaatatgaattatattgtgaaatgggctccacttttcagctctgtaagatttgtgcagagaatgacaaagatgtcaagattgagccttgtgggcatttgatgtgcacctcttgccttacggcatggcaggtataatcattagcaacatggatgtctttcttatatgtcctactaatatttctcttttcagttttcttaatggtttaggaagtaatgctggtaagtgctttgtttgaaatgattgtgtaaagattttatatgtttgagttgctatatataatttgatttttaactatcttatattttatctttaaatgtataaattttattatattagtcatcagtagttctacttctgtagtaccatggatttcagtatgttcacttataggtattaccaactagacatttttatgccatttattgataggtcagaatctgtttgtagtaggtcagtttctgaagccaagtaaaccatagtagataaatcttattttgatattttcaagcaaacttctttactcctgaggaggcatggttcctgtctcacatatgctccgtagtgctgaaattggagaatcagacaggaagtatctctcaaacacttatagttcccacagaaacaggcattaaagttccctatttactgaagcataatctcaggcaaattgccttcccatctgccgcaggcattcaataaatataaattgatttgaagttttataggaaggtctggagaataactggttttcccaaggactttccttttttttttttttttgagacagagtcttgctctgtcgcccaggctggagtgcagtggcacgatctcggcacacagcaagctccgcctcctgggttcacgccattctcctgcctcagcctcccgagtagctgggtctacaggtgcccgccaccgtgcccagctaattttttgtatttttagtagagacggggtttcaccatgttagccaggatggtctcgatctcctgaccttgtgatccacctgccacggcctcccaaagtgctgggattacaggtgtgagcccaagggctttcttatatttcttcatctgtaacaaagattggggatttttaaaatggatctttggacagatttccagttttgagtatttggaggagtcatggaatattttgatcaagccattttgaaactgtttgacatagttatattgaagttagaagtatattgatagggtttagaaagcaaataattaaattttctagtctttaaaaaagattttcggtgaagcataaagttgacattcctaccctatttctaagccctctcagtccttgattttctttgtccaaccctgcatctctgcatgagttgaggaaggatggacattgaggctcatggaagggggctgacagactcagaggggcattgatgcctgccgagctccttacttagtaataaaatataatgattttcccattttcatagtcataaaagggcctgcttcttcttttgtgaatatttttttaatggatgaggaaaagaggaagaattaggaaatgaattacagttgatttatattttcaaagtcctttctgaatgcccagagatctttgctacctcagtaacgttgttcaaaatccctatacttctcttcttcatatgcatttggcttatattttgttttacgtttttctttatatcctctcccttatttccttttatcccttcatgatgttggcgaaatttgcatattacagggagatgttgaaggagatcattctcaacatagatacttgattcctatttaaattacattaacagtaatagttctgcaaacttagcagtgccttttaaactacattcaataaatgtagatatgttggtagaagacagaattgtttgcaagtttatttcaaatgtgtcagtaggaggtattatagagatattgactcagtgatagattgtctgtaattggactacttaggattggtgtacctgataatcattcagtgtttcaggatacgtgttaaactaacaaagaaaacaaattgtatttgtcacccttctttgccttcagggtggtagtgtggtttttacaagtacaaagaaactaaaagccttgcatttctccctgaagaaaatcagaataataggctgatacaaattcctaacactctgcctccatgcagggcttgtgtatttcagccatttttcttggggctccagtcttagagcatacacatgcatacatgttgcaagacttcacatctgtaactcaatactgtgcttagtatttggaggttaagttggttaaaagtcagaagctgctatgagtttgacagaaacatttgtttagtaaaatgttttgttcaaagcatcatacaaaatagtttactggccaggcatggcggctcacacctcttaaatcccagtactttgggaggctgagacaggaagatcccctgagcccaggagttcgagaacagcctggacaacataaggagaccccgtctctataaagtaataataataataataaaatagttgtttgccttgcagcccagggtgagtagaaaagtatggctgaatataaagcaacaaatatttattttactttctatatacttcttaaaagaaagtttattcttagtaaataaatactacctttacttaagtcctaacttcacattgtcagtacattcttggaaactgcaactttgagcaaagtgacatactgtatgctgtaggaaccttaactcttgtttctatcaattagcctagggtaaaatggatttcattatacagtaagttgtttcacttaaagtctcaatttccaagaactaattaacaatattaattgaggacttactgtatttatttgttaggtttgtgaactatttgcagtaggttcattatgtgcaaaaggcataggaacatttcccagttgtctttctgtattactaatgctgtgtaatcaccacaacattttacatcaccacaacatgtctatgtgttactgtgcattctccaaattggtgtagttcctcttgcttgttgcttatcaattccttgaattatttcatgattttttatattggcctaatgaccttatatgaagatatgttcagtaatgttagtaagttgttaacatttactatttctctttttcattctcagctacttctcagttttacttttataaattgaggaagtacataattgtcaagctctgaaaattgtgtttagctaaaattttaaaagttatgtgagagtaatagtttactaagtaaagtagaaacaaaaatgacaaattcaaaactattcagaaggttgaaataataaattacatttatgttactagacagtaatgttattgtcttaatctgatcattgaattttgcacctaaattaatgaaaaatatgcaaacctttattttcagtattgtttttgaattctcctcacacaaagcagctcatcattaataagcatcctcctgatacattttgtatatgtttctgtaagctcttacctcattatgttcatattgtaaatatttccatatttatgtattttctttctagaatgtggattactttacctattttagaatctctctgctagcatgttatctgcacattggtcattacgcagtaaatacttatagattgcatgctaggtaatgtaaaagaaaaggaagtctaaaagtacattaaataaaaagacagtattgtaggttgtgaaaagctcttacaatacttttctgagaattatttatgatcttttcaaagaccttttatcatacttagtatctgagaacgaatcctagaatatctaaggcttagttccctttgttccattcactagctattgtgtgatttccttaacattttacattgtgatttttttccacccattcttgaaccatgttattttacgtttattgtatgcagtactaccagcactaacacagaagcagtaagactgcatttttatcgctgttttacaccaaaaaaaaaatatgcacagtaatccccggttcatgttttctctccccctaaagaaaattattcttaggtcaataattctaaattgatatttcacagtctctgtatctcagtgggatcttactggtcaaaggaagtttcaacttttgaacatttctacttttggataatctaaatatttttacatttagatacagtcttcacgtagtgcttcctgccaactagcgtatctgttttggcagcttttgtattattgcatgaacaggaatgtttgttgatcattaaaatatgttattgcaaaatgcctctggtatttaataaaaataaaagtcctataaagttaatctagttaaagcacagttgtaaaacattagatatgctgaaggtctcgtatctgtaatctcacctagctgtgctcacttgacttaacctaattgatgataaatatgtcagtaagaagaacaaaattatagcacacttcatagttccacaaaatattgccaaaagtggtatctaagcttgtacatatatagagaaatgttctcaaggtattaggtgtctggacttagattaaaataacttacgtctctcttgttcaattttttcctcattcaaaaatggtaccttaaagacattgtttttgttttatatgattaaatttgcaagcttaactgtgcacaggaagaatttgttattttgcttcttcctcttactggtttggtagaagcaaaccaagatggtttcaactatcattttccatttatttatttatttaggaaacattctttgagcagctgcaatatcccatgttctgtagtatgctctgaactgaaaagaactctgagacacaatccttagctccaagaagttaaagttaaaattaaacctgaaatttctattaaggggcatggtgttaataattacttaaaatgagtatcctgttatccttcaaatttaattatggctgctagacattttttcttactttctactacgttggttgggcatgctgatatgaacatgattttaaaggctgcgtgtctgccaagaagctatgataaatcagttagaatccaataggaaatattaaaccctgaccataaatcatactctgctcagcagtgtgcatttttagcaagtcattcttcaccaacttttccttccatctgatgccctactttggtttaattgaaattcattagagacttaaattttatgtaattaacagaaaacttaagaaatgcgcagtagctgtgtcagtagttataggctgcaagtggttactctttaattgctgtcataatggcccattagtcatgcctctgaagaggtgtcagatgcttttttctctttctgaaacatctgtgttatttaataaattgaataagcaagcagagtttgcacagaatactaagtaagttgaataatcacctttctagagacattctttgaagtaatactactctgtgtgcaacatttttgtgctacccttagtaataaaacttggagagttgtctttcacatccacgtgttaatgggacattaacaaaacgtttatcttctcaaccctgaacttctgcacatcttcctttgtgaggtagtatattatgcagcagtgattctgcagcattaccatgtaaggttaaaagttaaggaattgttttcattctgtgcttatttcaggaatctagaaaatggcttttgatttgtagttctccttgaagaggttcttcacatcccttgtaagttgtatttctaggtattttattctctttgtagcagttgtgaatgggagttcactcatgatttggctctctgtttgtctattattggtgcataggaatgtttgttatttttgcacatagattttatatcctgagactttgctgaagctgcttatcagctttaggagattttgggctgagacgacggggttttctaaatatacattcatgtcatctgcaaacagagaggacataaagaaagaatcaatatcatgaaaatggccaaaatgcccaaagtaatttatagattcaatctatccccatcaaactaccattgactttcttcacagacttagaaaaaactactttaaatttcatatggaaccaaaaaagagctcgtataaccaagacaatcctaagcaaaaagaaaaaagctggaggcatcacgctacctgacttcaaactatactgcaaggctacagtaaccaaaacagcatggtactggtaccaaaacagatatctagaccaatggaacagaatagatgcctcagaaataatgcgacacatctacaaccatctgatctttgataaacctgacaacaacaaacaatggggaaaggattccctatttaataaacggtgttgggaaaactggctagccatacgcagaaaactgaaactggaccccttccttatatcttatacaaaaattaactcaagacggattaaagacttaaatgtaagacataaaaccgtaaaaaccctagaagaaaacctaggcaataccattcagtacataggcatgggcaaagacttcatgactaaaacactaaaagcaatggcaacaaaagccaaaatagacaaatgagatctaattaaagagcttctgtacagcaaaagaaactgtcgtcagagtgaacagacaacctacagaatgagggaaaatttttacagtttatccatctgacaaagggctaacatccataatctacaaggaacttaaacaaatttccaagaaaaaaaaacaaagtcaaaaagtgggcgaagcatatgaacaaacacttctcaaaagaagacatttatgcagccagcaaacatgaaaaaaagctcatcatcacttgtcattagagaaatgcaaatcaaaaccacaatgagataaccatctcacgccagttagaatggcgatcattgaaaagtcaggaaacaacagatgctggagaggatgtggagaaataggagtgcttttacactgttgatgagagtgtaaattagttcaaccattgtggaagatggtgtggtgattcctcaaggatctagagtcagaaataccatttgacccagcaatcccattactgggtatatactcaaaggattataaatcattgtcctaaaaagacacattcacatgtatgtttattgtagcactgttcacaagagcaaagacttggaaccaacccaaatgtccatctatgatagactggataaagaaaatgtggcacatatacaccatggaatactatgcagccataaaaaaggatgagttcatgtcctttgcagggacatggttgaagctggaagccatcattctcagcaaactaacacaagaacagaaaagccaacactgcatgttctcactcataagtggaagttgaacattgagaacacatggacccaggaggggaacatcacacaccagggtctgtcagcggctggggggcaaggggagggatagctttaggagacatacctaatgtagatgactggttgataggtgcagctaaccaccatggcatgtgtatacctgtgtaacaaacctgcatgttctgcacatgtatcccagaacttttaaagtataataaaagaaaaaaaaaaaaaaggaaaatggcttttgagctcctgaatggaacaaaccccaaactgtgttcttcatatcttccttccaaaataaaaatgtatatctttgtcagttggatatgcagctatgttttgaattactgccaaggactttaattcaattaaatgtaaaattaattttcctgtggttattcttcctgtatattgtttgatataatttaaaagaaagatatcagcgtattcaaaatagtaatttacaaaaaaatcaataaactctgattttaatgtggaatatgattaaggagatttatagatgttccatatgtagagagtgttgttgggaaaatgtatatagttgtctgagagaggtgagaaacaagttcaaatgatcacttttaaggcaataagaaataatctttggccaggcgcggttgctcacacctgtaatcccagcactttgagaagccgaggtgggtggatcacatgaggtcagcagttcaagaccagcctagccaacatggcgaaccctgtttctactaaaaataccaaataactgggcgtggtggcgggagcctgtaatcccagcagcttgggaggctgaggcacaggtgaatggcctgaaccctagaggcagaggtttcagtgagctgagatcacggcactgcaccccagcctaggtaacagagtgagattctgtctcaaagagtaaaaaaaaaagataaaataaaataaatgttttactctatcttccttcaaaggcgaccagtcttcacatttctagcctcagtgaaattttataacttaggtactacaaatagaaaataatacttgcctttacgaacgttttaaattggcacttttgtctttaaccacccgttgtgtcttttgtgtaaatgagtgattaaatgttggagcttccctttcacgttgggagtaataaagaagctgcgagagttgtccaaacacgttatagtaacattatgaactagagcgatgcactagaaaaggaaaggaactgatggatatgagaaaataaaatctggtagaataagtgcttgattcttaagtctaatgactaaattagatggatgcccactatattgtagagtgtgtggaccgtaacagatactggcactttggaaacattttcagttgactccaacatggatcttttataggtgtttttaaagttgacaccatttttaaaaagtgtttagaatgtagactcattctaaatgaccagctcattctagaccaacttcatgcattaaaattttaaattggattcaagcaacaaatgtttaaaacaaaaagcttttactatgtaaaaacgtgtcctcagaaatggtataattattcagatacattttatgtcttcctgttaaagagctgaaacttttcaattagagcgaacagaatattcattgattgtagtagtttttttaattttgatatttgcaatttgaacaaaatagttttaaattttttacatttatgaatgatcagtagtagcaaccggctatttttcacctttattttaaccttgactatgaatctgagattgaaaaaccactacatgctgatcctatagtgtagtgttgaaatgattagactcttgaaatagatccccttgttgtgatttcctacttagtattttttgctatgtgaccttcatcaaactagtaaacccctttttcttgttggggaacaataattgtacctaccttataggattaaatgaattaatatttagagagtgcttacaacagtgcctggaattttagttattattgtttctaataaagtgcttaggagatatctcatatttccagttatgattaatctatgcacattgataattctgcaggtttaaaattgtattcattacattacaaaatggaattcgtatagagatacgagttttttcaaaagttaagatatgtttccttagttttcttattatatttattcttgagactatttttatactaattatgccaactggaatttttatagcactttataaagctttaaactaatttatctcattttatctttatggtgtctctaaatgtgcattatctcattatgccctgtaaataagatgcaatgaattgcccagtgtcacacagctgtaattggggaaggtagaagtccagtccaagtatcctaattcagaatgtctgtgctccttttctgatttactatgcaggcttttatgggcatcccaaatcaaaactaaaagagtctagattcaccaatgtcttttttccttgtccatcataataaaccagaaccaaagatctctcctgctctggggcattttgtctaagattactattaactatccttccttattctttcattcgttctttcagccagaagttattgagtttctgtgggagatactgtgctttgaaaattcttggtatggatccaacctattctcagtgcatttatatacatataatttttccagttataattgctatgtttaaaaaaagatttgtggcaacctcatagctacatgaaatatagcaaggtaatataaattagaagttattgataaaggaaaaaatacatacatatgcatacacatacagtaaaaatataaaatgcactccaaaatgagacttaggaggccctatgtatataccctacagcccttgatgtatattacatatgtgggaaggcataaagtgattgaccttaagtcaaagtatgcctctaataatcatgctgagagcaaataatttatactatatataatgctatcttgaaaaacatttaaaagaaggtatttaagatatagtatgtctgtcttagcaatatttaaacaaagtatggaaggtgattgatacatgatgatgatgagatggtactaacaatattcatttgggtttttacatagagtatttgtggagaatgtagtattatgaaggtttaaaatttttttctatttgtttgtcaatgttaattatctgagtttacctaaagttatattttaagtaatgtcactgacttacagtattaatggttgaaatgtgagtctgaattattttactgtattatgagaaatgacagaatttagtttcagctgtgtatagtattcactgataacttctgtatcctttggtttagaagtatttcttattcgaggaagtgaaacctactgagtcatttagaatagacggagtcctcagtacttcctcttaacattcacagaatggtggaaactagaaaatgagttatttattggtctttattctccattaatgcatattatttgatcttgcattaagtatacattgacagaaacattattttaattattgtattgaagacattcttcatgtgtatttaatcaaccacctgacagaaactagggcagagtaaccaaagtaacatttgagactttatggttagacgtctaatttgcatgtgacagtagtccatttataaagtgtgatggatgaagtcatattagagtaagtaccattagagacacattcattgtgatctgtgtttttgcaaatcaaaattaatggtcattgcagctgtttgttgatctgttgagtaatgtaaactctcaacaacaaagctgaagagaagatgtattttgtgatatctactcttataacaggcactcttaacaacatcagtaatttgtataacattaaatgttcaagtagcatagagaaaaatctaaattcagttttagatgaacagttctttgttttttcttgtgctataaagacacagttattgcctttcacctcctcccccttcaaaactcaatattttcagttatctcttgtgaggaaatatatcacataaactggaagtcatccttaaccagagcaatatgtaagttgaccctggaggttcaaagagaaacttacgtagcctaatagtgtggcttgcacattctatgcactgtactaaaaaataatgtaactttcatgatttcgattgggtggaataatttttagttacgattaggtctttaaaaggttcttggtttttagttatgatactaaaatatttaccagtgaatttatatgatgtgtaggaggtacttcaaaacgatctaagagtgaaaggaacaagagaacatatagatgaaactggactggggatgaattgataattgttgaagtcgggtgataggtacatagaaatttatagttttccctcaaattttatgtgtatctgagattttctataataatttttttaaatgtatgagactatgtacgtctcaaagtactgctttccattcttcatgtgttaaagacagagggaccatcagatcttcagatcttgctttctttttttcttttcttttcttttttttttttttttttttggcacggggtcttacccttacacctaggctgagggcagtcatgctgtcgtagctcactgcagcctcaaactcctggtctcaagcgaagcccccagctcagcctcacgaccagctgggacttcaggtgtgtatcacaacacctggctaattttttaaacatttattttttatagagacaaggtcttgctatgttgcccaggctggcacagcttgctgttaaataaaactatctttttgaaattgtcttatgtaaatctgtaaaagtattccactataggcacctaatatggatctcttttgacttttataacaaggggagttttgcctaaatgataatatatattgaatatgactttaaatttaatactctttttataggagaaagattttgcttttcttaaatatttactcctgtgttagaaaatatcattgcaaggaggttatcaaaaatagaagaattaaatcttggttttgttatctgtaaaatgatggagcaaataatatttaatgtgttttgaagccccctggacatgaacatgtatggtggtaaaccttgaaggattctatatttatatgtctgtatttctttataccaccttagttcaactgttttaccattccaagtttcttttccaaattatgtacaagcagatgaataagaatatgttgcaattgatttttcttaagcaagctcagtgttttttgttttttgacactttgtttggcaaaggaggtgttcaatttgttgagctgactgagacttagaaagaataaactatcacaggatctgccacaaagtagatgtgaggtagttgttcagtgagaagagagtgagagagttattccatccttgatccaaacatcactgttgggcaggtagatcactaatttcctattaaaccaagtggacaggacagtcctgaattaattatggaacagtttctttaaagacgtcagctctctgcatcccttgtcttgccactgaaatggtgctatttcatcccatttctcccttaaagtaattttgtgatttttgccacttttaaataacacattgctaaagtcagggtataatgcaaaaccaaaaatcgggtggagaatatcatataccatcttatctctagaaagcaatgttgtctgtagggcaagaaaacagtctttatttccctgcaaattgtgaatttttaatgtagttagttttgagaaatgaatgtaggaaactttgagcaaaacatccaataatgaccagtaaatacatttccagcccaaaagtatttgcacaaatctttttgtatcatattgtttaaaagcaagataagggcaaaacttagtatctcacagagaactttatatttgagctgtgtgtcaggatgacaggctttcaggacagatgatggcttttgaatataaatgtacacattttaatttttcctaattgtgtataaagattttaaaatacacaggcagttaaaacaaatatttagccacagttagatgcacaagtattgtatttttctcaccgatactactgctttattatgaatttttaccaaaatatacttttttatggaatgtttggttagtactgcactcttttcataaggagagatacgattcaatttccagttttcttcaggactctaatgccttgatacattagaataataagtgaacagtcaggaaaataaagaggtttcttctcttgggaaaatcaaactttcttaaaactttatttttccttcggaaactgaagatactgaccatttattatacattttgttggctccctgttctatacccactaccacttcaagagaaatcttcccccacctcctaccccaaaaagtctttttgggggtgtgacttttatagttgtagaacattattagcatttctcggtactgtttattttgaacaaaaccaatccatgcattttctatttgtttaggagtcggatggtcagggctgccctttctgtcgttgtgaaataaaaggaactgagcccataatcgtggacccctttgatccaagagatgaaggctccaggtgttgcagcatcattgacccctttggcatgccgatgctagacttggacgacgatgatgatcgtgaggagtccttgatgatgaatcggttggcaaacgtccgaaaggtaaaactagaaacatgggtttagttaaggtgatgtgaccatatgaaaaggaaatgatgccgtcataaatggagtatgactcagcgtatttgagtttagaaaagaggcacacacacatactagcctaggcctgtacagggtcaggatcatcaatatcactgtcttctacctccacatcttgtcccactggaaggtcttcaggggcagtaacacacgtggagctgtcatctcctatgataacaacgccttcttctagaatacctcctgaagaacctatctgagactatgttacggttaactttttttcataagtaggagtatactctaaaataatgataaaaagtatagtatagtaagtacataaaccagtaacattcatttattatcattatcacatattatgtactgtacacaagtatatgtgctatacttttatgcaaccagctgcacagtaggtttgtttacaccagcatcacacaaacacgtgagtaatgctttgtgctatgacgttaaggtggctatgatgtcacccaccaggcaataggaatttttcagcttcattataatcttataggatcaccatgatgtatgtggtccattaccgaaatgtcattgtgcagggcacaactactataatgttgacaggctgatataatcatagtttgagagagaactagattctcctcaaggtactctcattggttttaaacatcataatgagaggtaatgagagtgtttgtataaaattaaacgtcatctaacactggcaatagcaaatctgtgaagaaaaaatttaagaaaggaaattattaaatttggaaatggtgaaactgaatttgattaaaaatattctttgttcaaatctagaagaagtgtctgatagagttttttcttaatgggaaggctgtctcactgtttggcttctaagaggtcacataagatttacttttgtgaatttaccagaatctgagtttgctcattaatgttgttgactcacaaaaattgaccttgtcagttcactgagaatggatgttactgcccagtttaagtttatataaccaggtacacaacagactagtcaatgaaccagaatgccaactgattaatttacagaccagaaatacagtggtcaagagaggtagactcttggatatcaggctattccctgtacaggaagatacatgaaatcccaattactttcacaaattttttgctctcaaaatcagagaaatgggattgagtggtgtgaaaggtcttcatatatggtgccacccttcctcctgacttgggcagacatggctaatcagtcatgatacttaccgccgctgagttcagacttggccaacagagcctttcaacacagccctgaagatcttccactgtagttcattaggatttggcaggtagcatgaaacctatttgccattgtcactaggtggagtgatgataatgtgtaatggcatcagattgtattcaccgtattcatctatctctgtaggaaggaaatgcttggtagtggaattttgacaaggcatttctttgggttacttcatttttagggctgtgtgcgagttttcctcttgggaaactcctgcattttctcccttccaatgttccatgctgaccaaatacattcccttaggatattttacatacaaatttttacataggaagatatgttaacatcaccaacatggctactctcaaattttgcatttttctggaatgatttttattatttatcttattggtttttcataaatgttataatttaacactcagagaaactacacgatttcactctttaatcctgaaagatacagtttttattaatagtttgaattatgtgattttttttgacctaagaaatggaagaaagtagttattcctcagaaatcctgaaggatgaacaagaaaaaataatcttagattgaaacagacttgagacttgagtctcaaaacaaagttaacttaaggaagacgtggaataaagcaccagttctgctacagagtagtaatggcatgctaggcaagttatataacctctttcttcctcagtttaccccttcgtaaaacagaaaaataatagtagcttctctgttgggtgttgtgatgatcaaacgggatcaaggacctaagaacctagaagaacgtcaggtcaccaaagtcataaatgctcactatattattaccaatgttaattaataatactatgtaatacatattctaggatatactccataatctgagttagtagaaatcatttcatcactatgcatgtgagagagctacatatgcggagctggtgatattgatgtactgttccccagaagacataagtttgaatactggctctacaatgtacaaatacaaacaaatcacatgactagtctgagcctgatttcctcttctgaaaaatgagaagaataatacctccctaaattgttgaaagaatgacatatgttattaatgctggttttattgatttgtgaccctttttactgcaagttaaaaatgattttacattttaagtggtgtatatttaaattcctatataagtacctacaaaatgtccttgattttacatcttgtcctaaaatattcactacctggccctttaagaaaaagtttgcagccccaggtctaggacatagtaagcatttaaagaatggttattgaatggatggataatggagaatgacagaaaagtatttgagatacaacagctcaagtagttgaagtgctccaggtagcagtgttttttttagctgtgaagacatttcaattttctttactaaatgggttttcatcttcagtgatccatgtgagagggtaggtctaggctttaagagaaattttaaaaagaatttttgtataccttactgcttgggagaaaacagtatctgccctatgtgaatttgggaaaagttgcagtctcaacctgctttccattgaattaagttgaagcttgagcctcttttcagtagtggcactaacaatcgaaaggaaatgctgggaacataacatgagaagcagaatgttccaaggtgactctagtgtttctccttgatcttatcacccgctcccaagaccattcatatttcattctctctggcacactggtgagctttctgtcaagggagctgagacattttcaaattgatcctttctgttttttaccccacaaagagtagaatgatgatctcaagcattattgtcctagaagtcacacttcagtagcttatttggcagtcagcagtgtcatttaataaagctttacttcactacaatcttgttatactttcttatgggagttagatagtttagaaatttatatcacttgtaattatttgtttttaagttgaagaggtatatttcagttaaatgtctttatgtctactaatctgcctctagtcaattaaactgattgtgacttttatagcatttcataaatgtgtaccacttaattttcaataaaacctaaatttttatatagatacaagcataattctttctgaataatttggaagaatattgctatgatgttatgttcttatagtattttatatgtacttctatatcaggagttacactaaattgttatttaaaggactgtctttaaggccagggacaatgccttgtatttgtgttcccaggcacctaaatgcactcaataaatatttactaagtgaactaataaatgcacactcctgcacacatgttcctttagggcaatgacctaatcttatgcatattttaaactttgttccaacctgaatactaaatatatatatacacagagcatcaaactgatagattttatccagttttttcttataggagtggttataaacaaatgtcacatggtcattttgacacagtagttcttctacctgaatgttcttcctctgttttttaaatcattcttttgtcattcattcatgcattttcattcattcactcattcatttattcatttattttttaattaactgatgaattaatttagagctggagtctcgctttgttgcccaggctggactgcagtggcactatcttggttcactgcaacctctgcctccctggttcaagtgatttttctgtctcagcctcccgagtagctgggattgcagacgcctgccaccacgcctggctaatttttgtatttttagtagagacagggttttaccacattggtcagcctagtctcgaactcctgacctcaagtgatccagccgcctcagcctcccaaagtgctgggattacaggcatgagccaccgtgcctggtgcctggacttactcatttatttttaaaacattttattctctcagttaaaagagtgactgccagtgattgtccaacagaatggttccattgtttctatctgccattttgaatactcatctttttcttcttttatgagcgggccaatgataatattgtgaaattgtttcttcctgtcttcagcatattacattctttaaatgagtaatgctgccatcgtagcatggaaacctgctttgattgtatattcctgttaccatggtgatatcccacagctggagttcataaatagtagcatactaaacatatagtgtatttctattatttcttttatagttaaatgtgtttaataatgctaatccttacagaagcaatagaacctaaaagtctataatacatactttttgattccctctctgatagaaagtattttgtgatactaactagaatatgttttagattttgcccaagtctgtatcgttgcctgagttttcaagctgtcagaatcctgggataattagatctgatgtgagccctcagacaaagtccaggatgtgactggtaagatcacagccttctctctgacttcattcagatcagagctaaaaaacagtatctgttgctacccagtgatttgcttcattttgccagaggattaagaggaatcttaacagtttttcacagtattagtcaccaaatacataacatttacatttgaaataaataaaaatttgcatataaaaataaaatgttgacagactgaactagtgaatgagcccagattagttcttattgtcttaaacattgtattttcttaaaataatatttaaaatcttaatggccacattagaacaaaaatgggtatgaacaaaagtcaaggaagttattcttttttatgcattctcctttgttgccttcttcaattaaaatacatcttgctaattagaaatgtaacatgtcatctaagtattgcatttcctaataagtgtgaagaacgtctctatagcaggggtccccaaaccccaggccatggaccagtaccagtctgtgatctgttaggaatcggctgtgcagcaggaggtgagcaacaggctagtgagcgaagcttcatctgtatttacagccactccccacagctcgcattaccgcctgagctctgcctcctctcacatcagcagtggcatcagattctcaaaggagtatgaactctattttgaactgcacatgggagggttctaggttgtgcgcttattaggagaatctaatgcctgatgatctgtcactgtctcccatcacccctagatgggactgtctagttgaaggaaaataagctcagggctcccactgattctaaattatggtgaggtttataattatttcattatatattatagtgtaataataatagaaataatgtgcataataaatgtaacacatttgaatcatcccaaaaccatccccttcccctccctgccaccgttcgtggaaaaaatgtcttctacgaaaccagtccctggtgccaaaaaggttggggactgctgctgcatagtattcctgatcctaaggaaaggggtgtgtgtgcatatcacagtgttttgcagctatttttaggaggatgttgcctttttacgttgtctatttaaatctgaatcacaggattagagtccgtgttggagccgtaagatcaaaaattacaacagaagtgaaatacaaaaataaaaatagacattcgaaatgcagaacatggttctcaactataggcaattttacctcttgagggtattcagtaatatatggggacacttttgttttttgcaatgactaaaggatggcaaatactgctggcattgagtgggaagggccagagatactaaatatcctgcaagcccatgggtggtcctacccaaaagaattattctgaccatagtactaatagtctagtcctcaccactgccttcccacaacatttaggtagagccgtgagtgacagtaagcaatccgaaggcacaggtttgttgttcatcgtttacttgcactctgtttactgatcttctaaaagctcttcgtgcaaaatagtggtattttctttattagcatgtgattagcaaaagaaacaactgcatcatccaagtgctgtgtgatgtcgtaggataccttgaagacattgttacttatttctcaaaaataacttgaatacatagtatattagaagaagcaacacttgaactctaaaagttttgagtccactgcctcaggtagattgtcagctccttgaggacacaggctatgctttattcttctttccattcttagaggtttgcatggtgcttgatacacagtaggcccttgagaaggatttttttttttttaatgatcagtggtgacactgttcttaattgttatattcttaagtagagctgccctcttggagtgaaactgcctgggctcatcttctagttttcctacttagtatctatgtgccttgttttatttaacaccccctcccactccccttcccccaagtacttggtccataaaactctgcctctttaagattaaatgagttcatatatataaaaagccattagaacagtgctggcacatggaaaatgctaagtattggttgttattaatattatttttaaagtaaattaacaaagatggggtctcactctaatgcccagcatagtcttgaaatcctggcctcaagttatccttccacttcggcctcccaaagtgccaggattacaggtgtgagccatcacacctggccacattttttatactagtgttatttaagactcctgaaatattgctgtacttctaagaattaagttattagtatttttgagttgtctatggaaggttttcttttagatgttgatagcattccattaggaagaattagatgccaaaattttattggttaccaagcaattggttgtatttctttaacatattaacatctatatagttataatttcattgcatgaccacattaaaataatttactgttaaaccatgcttcaagtttgaaactcagaaaatgcaaacttgtcaacatgtcagctgaaacactattttgaggattaaataatttagataaggttacaatgttcttattttctgtataactaagttgaaatgattaagtattatctaaagtagggtgaagaactacagtaaccaaatagcaattgcttgttccaaccagctttagctggcatttggagagcaataagggttttcacatgaaagcattttttcagtgaccaaaatttattcctttaattctcagaatgttcttgtttcttggccatttttatggaaatatttctgaattatatgtcacccttccctgccttctcaaaattggttatgcagctgagcgaaccaaagggcataagaagccactgtagtcaacatgacacatttctaaaagcttacattttgctacaagatttgagggtagcttgcataaagagaagagaaccataaatttaaattaaaatcacacatatatttggatcaggatataaaatttgtgtaaatgtttaaagtaaaatacaaaactttaaagaaatttcaaggttatggaggctgatcataggccaggagatcaagtccctctcataagaaggtacttcaaggagaagcagtatcatcacttgtgttaacagtgtttaatatttcagtagagcagtgcccttaaggttatccccaagtgtgagactgcactactttaaaggagacctgtcggcaactttattgaccacttctctgccagacctcaaagagaaatcagctcttattccatttggtgtttcttaatatataggtttctgttttcctccgcttctttattgcttctaatttgaaaatttccagaagttactagtggaacatagacagtaattcagcctttgaattagtgaacttcattttacacagaaatcaaatgtccatattcttaggaaggtagcagggtgcctacattctgtttctgtattaagaagtagaaaaaaaaatgttcctcctacttcagaggactttcctgtttcattctgggtttctccccaaattattgtaggttgagacttctggaagtatgaccatgggtaaccaggaaatgattgtattgctctaacacaatattcttcatataagcttttgtttattatctgtggaggtactctaaaatagataacacaagtcatttacttaagctataatgccatatgaatatgtgagtatgtgtgtaagcatttttgtagcatataccctctctgaataatattctgtataggctactattttaaatactcttgatttttgttttgttcacaaaataaagtgaaaaaactgagaatagtagcaagtaaaatatgcttagactattttatcatgtgataaaagttttatcaatgtcttcattaattttcacgcatttatagaaaaacattgactctctgagtccttctcatcatccttattatagtaactgtatatacctttttcagatatggaaattcattaagtaaaaatcttgttaaaagtattataaaattgactttgattatctctgggactgtcagaactctcatcttattagtaattggagaggttttctcttgtcctgtttttataataagcctgactgtgcttgaagtttcttaccaaatgttttgccatttccataataatggatcttattaacgtttttataaaatggctctttaaaggtgtggataaaatgaagagtgactaaaatagaatgagttcccaattattattggtaattgctgaacatagtgagatgggcttttgactactttacttcttagggtttttctgtcaggattttctgttaagattgaacatgtggatttctctgttcctcgtggtagttataaaggattctgtgcattttgtcagaaaaataaataatagtatttattaatttccaaagcaaaaggatgagtatgtagacgtaaaagaatccaatgtggtctttaaatttctagaacaccaggattctagtttgtaaaagatgttctcatctgttactaggattgaagaacttaagagaaattgttagttagacaaatatactggtgtgatgataatacaggaaggaatcaaggctggctcagcctttggatttggaaagaagctgaaacagataatttatcataaagttttagaaacaagtgtaatactagaaaaatgtgagaatcacctaaaatcaagataaaggaatgaagtgatactgatcagtatcttttaacttgaaaggatgtttgtgtctttcccaacttttgcagttacctctacataaggattttggatattgtgaataagttctatacagttaattctgtgttcacattctactttctatgctttatgacttaatttttccatacttatatttgtttgtcttaagattagagagatgaacatgaaggagtgacaaagaaaggaactcatttaagcagtgctcaaaaggacatgatactttagtcattcattaacacatgaaaaccagaagagcacaggcgaaatctctaccatgaaaaagtcagaaaaatttaactgcagaaaaaatagtgacagcaattataacagatagaaagaggttgactatcctaatatataaagagcactttcaaatcaacaaagaggaaattagtggatatggggaccaaaaaaatgtaaaaagctagtgacccaaagaagaagtacacatgtccaacaaagattgcatttctttcaaattatttgtcaaggaaggaagggcaaatttaaacattggtatggcccattaaaatgacaatcaagcatcaaagcaaacaaaatattctttgcatttgagttttgtgtaatggtaattatcacacatggctggtgagagaataaattggttttaccatctggacagcaaaagagccttaaaaatattcataaattcgacacggttacatgtctagtatcttgtgctcaaaaaaattgtatgattctttccttaaaaactagcacatatatggttaaagatttctttatgatactactttataataaagaaaacttgaaaacagcataagtgttcattgcacaggaatggttttgtaaatccatatatgcatactttaaaattatattcatgaagaatgtttaccgctaatttttttttgtataatgctaataaacattgagtagacttaacattgtgtatgtgattaggaaccatcaccaatggctatatgtaggtgttctttaaaatatctttatatttccctataattccaaaatttcctagagtgaaattatgttctttataatgaagagagaaaaagtgaaataaacagaaaattgaaaagatacaaggacagaactgccaaaaccagtaaaacgtattttttatgggaaacagtttgacaacatgcatacccctaaatttataagcctaatccaattcttaaactacttttcttgttatcatttgttgtttttgtgtttaagaccctttctaggttaaaaagaaagcctaatcatgttaaattaaattttaagtttgcttttttaaaggtcagtgctaataatagcaaataatccaagaggcatttctatttgacttttgaatgcatttttacttaatttaattatttggttagatatttgattttgttactattgcattaagagctgatagtgggaggaattgtctgggacaaaataagaaataacaagggtgggcattttgtttaacagtaactttaatgggattaccttttggcagtgtagatgggcaagctttgactagaaatttggagataatataatagattacattctgtcccttttacatcaaaataatccattttcctaacaatttcatctaaataaaaattaaatattttacatcagcatttattttacataatgtttataaatgttttacatcagcatttattttataatgcattatttaattttattaacccataatgttctgtcaaatgcattaattttattctttaatctacagataacaccaccaataggtggtgacattttcaagactgcatggcctctttatattataactgaaatttaaatataagcaatttgaatataggaaatttaaatataggagatctgtggtttgaaatcaggttatacatttatttatatgattactcaaatgcaaaaaaaaattgttctttataaccagttggcattagagcttagatagtcatacttgaaatttacattttctaatcaagagtatccgtatgaacaaaatactaactgttgttattcagaatttaaatgaatcctttgctacttttctacccaagatgttttatacttatgtatttggtctgcatttttatacacaatggaagtagtagtgattaagaggaacagtggacaaatcagtaagtgataattagcacagttcacagtcttagaatttaaacctgagccaggggattggctctatgtttgtttgttattattgttttaccccaacagctccctttatcacctatcacatgtagaaaaagataaatggcctgggtgatttgagctggggattagaactgtggaagaaagcccagaaaagggtggaggaaatggctgataaggagtcaatttaggggataatatgaactggtgggctaaagatgaattcccacattcaggtcccagctatagaggcatttgaattacctggtgattacctgtacaggggaaaagtctgttactctagaatttagtcttttaaaatgcaaaaataaaaataaaaaatgcagctattacaaaaagacagcattgtcttttaaaggagaaataattttggtctacattgaattgatgtactttgtttttttttattttcagaaggataaaaaagagcagactttttattctttaaagtgagctgataaattttgatgtcctgaatttttaatatctcatccaataaattaattatggactggattgtgcaacattgtgctagatttcctttttttccgtagactttcaaataggaaggaaaaaacacaatttgtgatgactcaaataaattaaaagtgaccttctatatgaacattacctactaaaaatgtttacaaatcttcatagtgtttgaattttaccagcaatgaaagttaaggcaaagcttcagtacactaactgcataattgtttttaaaaatagtaaaaggttcagcaaagaataatgcattactatcaaaagagcattgttaaattatctactcttaggtaggaattttactctaatttaggagaactcaggaaaatgaggtttggtgagtttagtacatataatcaataaagatgaaagatattttttttcttcacatactctccataaaatccttctaactaagccaacttacagatactgtgtagcttctaaatgaattaattcttcaaaaggacagtacataatcaccttcagaacacagtatgaattgcgctaagcaagatatgcttccaattacattcacaaagcttcagagagcctgctcgtctggaagtatctaaaagttcaaggttattactttgccacacacattggtttggatgtctgttctgaggattttcattatactctttcagtatccaacaggctcttcaacacatctgaaatcaaatttaccccatttaaacatgctagaaatttactaactgcttaaatattagtaattaatccaatctagggtgaaagtcaagtcctaatactgataatgggctgttagctctatcacaattctgtgtcttgtttcagttaatgagagaagtaggaaaatatttgcagaaaaaaagtgcttggaggagcacaggtctcattcagcagtctttgcagtgtgtacatctagccctgaaaagtgtttttgcaagtaactaaagaactgtgcattctttctatatataaaaaaatatattgtttgggctagaaacagtattgatagctttgcttcttgattcttctttgtaaaggagagtagccatatcaacaaagcatttttttcaggtaatagcttttctagttctcagagaatataatttatcctaataggaatggtggagaattagatgtcctgtgacaattgctgatctacagtgtcaagatgctgtgatgcaaatagctttacatgaggaattttttctgatctatgatgattttgggattagttttgctccagaaggttcaaatttatggaacatgtgaggccctgtgactttctgggtagaactattcttttgttaagaatcactggctgtactcaagtcagtttgtgactatagagattctttattttctccttcagtgacaattgaatttttttgacttaccataaccgagctaaaagaaatgaaaaagaatcattaatttttaaaaaagaaatgtttctaaaaattgtaatgtaaaattatgttgaattttgttgaatgattttgttattcggcaccaacagagacaaagactttgcagtttagtaatgtcatgacaatattcaggcatatcggaggtatagtcttctgtttagctactcagatttatttattttattatttttttagagacagggtcttgctctgttgcccaggctggagtgcagtggtacgattatagcttactgtagagtcaaactcctgggctcaaggaatcctcctaccttagcctcttgagtcgtgggactggaggcgtgtatcaccacaccattctaatttaaaaaaaataaaaaattagtaaagaggaggtcttgccatgttgcccaggctagtctcaaactcctggcttcaagcagtcctcctgccttggcctcccaaagtgctggcattacaggcatcagccaccagggctggcctcagatttatttttaaaaagtctttacaaaggacgcataaatttccaactatataaatgtgggctgtgcagtgacttccttgcaaagagtatactatgggaaggaggagaaaaaaagaaacttaacagtgaagaagtctgataaacaataccacggtcaggtaattaaggtcagcaacagcagtgatgaatcatgttgatagcatggatccttgatatgatgtggtcaaaatgacactttacttccgtggtcctactcctcaaaacttttaaccccaggctaattatttttaaaaattagacaaatcccaataaagaaacattctgtataatctctaaccagtactttacaaaactgtcaaagtcatcagacacaatggatgtctgagaaactgtcagagccaaaaggagagtagggagacgtaataataaaaactaatacagtatcctgcatgaaatcctggagaagaaaaaggacattgggtataaactaaggaaatctgaataaactatggattttagttaattaacaaaagccttatacaatgtaactaagtgtgaatgtgaacgcaaatccattatctcagttaaagacagactaaatgataaagctgctgagttcatattaaattgtcaaatgatgacatcagcaattcgtacaaaggtaagtaatgttaggaggaaaatggcttacaaataagtttaaaactataaatactagcattcagaaacagaacaatatcaaagcatgatagatagtgttgtaaacattaagtctaaatcttcaaagagctagtaacttagacttggaaactgcccagtattttagaacagaatattgtttatcctgttaaggctacttgattaactgtatggcttttataacaaatagaaattaggttatgctgcattaaaacacatagacacacacacacaaacacacaacattatgcaataggaagtgttacgtacaaattgaaatacttactggcttttcgatgctactttatctaccagacaatatggaaaacttgtagtaacagaaacttagtttttgccagaagtacagacagactttcctagatatagttcattgtgtttcaagaaaaatgtttaacttgagaatcttttccatgtgtagtattaaggaaaaaaaaataggcttaaatcagtttgttttaaacacacaattatttttttaaaaccccacctgatttaattggtttgcaggaaaatagactacatacaagatacatgtttggaacaaagcaatagctaagtattagaatgtacaaagctcgagcaaaaaaatttataatatagagatccaagagcaatgtgcattattgcattatgtgtttctggattcctcataaaatatagatggttttcttgaagaatatctgcatttgattgtctttatactatacttttgctgttcttttttcttagcccctttctgcaatatgtaggaaaaacttatcagtcttttcttttcgtaatactacccttgagggacagtatgaactatttgcttctattaatcagggtaaactaagggaattcattttaacaaatgtatggtgccagaaaccttcttccaaccaaatatattctttaagaacagagaacactctgcacagctaataaacagcggcatctttctctttttctgttctagtgcactgacaggcagaactcaccagtcacatcaccaggatcctctccccttgcccagagaagaaagccacagcctgacccactccagatcccacatctaagcctgccacccgtgcctcctcgcctggatctaattcagaaaggcatagttagatctccctgtggcagcccaacgggttcaccaaaggtagatcaattttattagaaacacagatgaaaattttgtaagacaattattgattgctcagattcttttaaattccattactcatatttttttgcttttaattgtgaataagtttgatgagtttctcgtttagtttatggtgagcccacattcatatttcttgttttattactatgagagttacacataatttttgcagagagcatatgtctgtagccccatgatttgccagaataagaagcagagtaagtatagttattttgtaaaatagatttaaaaggtcattatatgcattaaaataatttgcatgctgttatcaaatgatattttacgctcatttttatagtgccatgacaagaaaaatgtgatgggagtatatttgcaaagggcttaaggtatgacaaattatcacccttgtttcaaggcgactcagaagagggaattatatgtagtttttaaacctggagaaattaattacaatgaattgcaatatttgcagagtaattatattactgtttaatattaaagacataatttttactctacagttaaacctacagtttattttactgtgtggattttttcctcgaatttgataagtataagattttaaaaattaattttatttggtaacatgctctgttgtctaaaatttgttggaagcacaatatatttagtagtgtttgattttcctgtattaccagttaacctggttttaagatcacacattattagaatatcatttagaattatgtaaacacaacagattccttttttctctgctattttctaacattaaaattacaaatcaatcatcagattaaccatgtaaataaaagtcaaaagctacgaaaagcatactcattcaattcattgatctatacctttatatttctatgtaagaatcagcctgatcttttaaaatactgtaagaattcataaaattgaagtaattccatatgtagtgctgctctgttacttgtgatcttttactattctggtaataaccgataaagaagcagagcacatttgcccccatatcagttttgctgtatcacagtgatgaaaacaaaaataaagaaaaagcttttaatcttctaaaaatattacaaatattacaaatcaagttactctttaaaaaaactgaaaccatgacaacttttctcctctctcctaaatcatagagatgtgcaaataaattattgacatattcttttaatgtcaaagtcattgtatgattttgatcttctacttgtttctgtatcatttctataacttaacatttggatttatgtactcatttctactttttcctaatgaaatgtatttatgagttttttattctcatttaaatttcattaactagtaataaaagcaacttattaaaagatggcacaggaatctagtaaaactccttgtttggcttagaaaattaaagcaataatacactagtttggaagttctgtcagtgcatggtacaacctttagtttttttttttttttttttttttctcttctgtttctttagtcttctccttgcatggtgagaaaacaagataaaccactcccagcaccacctcctcccttaagagatcctcctccaccgccacctgaaagacctccaccaatcccaccagacaatagactgagtagacacatccatcatgtggaaagcgtgccttccagagacccgccaatgcctcttgaagcatggtgccctcgggatgtgtttgggactaatcagcttgtgggatgtcgactcctaggggagggctctccaaaacctggaatcacagcgagttcaaatgtcaatggaaggcacagtagagtgggctctgacccagtgcttatgcggaaacacagacgccatgatttgcctttagaaggagctaaggtaagaaatacgcaaagcagaagctagagaatctgcttataaatgcttctgatggtcagtagcataaaaggttgggaagtgtttttttttgcctagcatggcacttccctgtaagtctttaattatccccaagttataaataatcagaagctcattaaaacttgaacttaagagaagtcaggaggttctaagtaatgatttaattttaatgtgaagacactagacaatttgccagagatttatttcaccttcccgtatttcatttgccaaaaatttcttctattaacaacttagtggtggtataatcagcctgcatttttttttttttttgagacgaagcctcgctcttgccccccaggctggagtgcagtggcgtgatctcggctcactgcaacctctgcctcccaggttcaagcgattctcctgcctcagcctcctgagtagctgggattgcaggcacctgccaccacgcctagctaatttttgtatttttagtagagatggggtttcaccatgttggccaggctggtcttgaactcttgagctcaggggatccacccgcctcagcctcccaaagtgctgggattacaggcatgagccactgtgcccagccagcacggtatttttaacaaactcctttagttccatccaatttttacaagttgtgttactatacatgtcataaatcagttgttggagttagttattgttgcctgggacagtgcacattaggcagccaggtaaaatgaacctcctatatacttaaaaacactaaaccaagtttactcttaaaaatcaagttcttttcccaagttcttttcccctaaaattgagagattctcacccttgttgacttctcacttgaaggatgttactactatcatttatatgtccaggaaggagtttatgtgtgcaggaaactgaagagacagcagcagaaatcatttactttagaattcttggtagttccttggcagaggtatactgtaataatttctggtatttggttccagggtgcttttgactctgagattagatccttgccatcttccctctgctgatggaggccttggctcttctgaagactataatattaaagtgatctcatctctgtagaccttaaattgatattttacagaagtagtctagtccttcaatataatggttaaagttggtgagttcatcttatattcaggatataaggaagaagcgtgacttgcactcagctcctctgtgtgtggaggtacagtgataatgaacactttgtatgacagtatttaacctcagtgatatggggtagccaggaaaggaagagtcacaactcagtagcacagcattcaaaaccaaaggcaaggagtggtggcagtttgctttgactctttgctggtgactcaccttggtaccttcagtctcatctattataaatatgaggatctctaaaggtttcctcaggttcacctaaatataatgtaaatgtaagagaacatactaataaaaccaattttataataatctctgttagtggggagctcctcctcaaaagagtttttccacaacctagaatgctgattggaaggacctgccattcattttcaaaaattttcaggtttttttttttccccctttagctttactttttattcatatgtgatcacacttgtcttgggaagagtgttagaagaagctgtaattaactagttatatctcagcagcatgttataatttattttctaaacggacttcaaaaatacttgaaatataatagttgttatagccatttcattgaagatatcttgtctcggggttcttttagataacatgttatagttttaatgctattataaatttgccctcctaagctctagaaaactggctgttaatttttttatgagatgttaccccaatttcttaggttattggtatgagatactgtttttattttattaactataggtatgaaatattgtgagttcagttataaaaacattcctttaaatatttctgtgtgaactttcatgttgtgatcattgaaacagattagtataatagagaacactgagtgaaaattttatctcttattgaaagctgaactttaatattgcttagttctctctaaataattctcattaagatttcctaagttctaatctcatatattgtgggtatttatattgcaatgctaatatcctccagttaatttcatgttactcttagatttggtgtttcaaccaaaattagacttctgagatttctaatttcaacctaattgtttaacttctggagtgagctgtaaaaaagaatttatatatagttgattcattgaatgccacaaaactataaaacagaccatgtctcctcttttattactgttataaaggaaaaatgattcacttcattagatcatagggcataccagaacttagataaattagaaaaggcctaattcctcttctcatttcattgttgggagacttaagaggttggcttcaactaacaactgacataatcacttaggatcctgtaattctcagtttctgtgatcctgggttggagtttgttaccaggctccaaaatcaggcctggatttcactttttgctctagaatatactggctttgtccccaaccttacttattttccttataaataaagtggaactttattttattcctttatataaaatggaataataataatacctggtatctaggataatagttagcttccagctatctaaatttctaaaccccttggttcaggaataaaaccaaaaataacagctgtacatagagtgtcaaaataagttgtaacacttggcatttttattcaaaatagttgtctgttttttaaaccgaaacatcttctctttgtttcactccttttttcttttatttaacgtagttcctaatgaatgcttggtaagcactcaataaccaagttaataacttggttaagcattcaataaccaagttaataactcggtgcttataatataatacttacttggtgctagtaatctaacactaaagccagtggtggagacaaacagtatatgtgcttgggtttgagtgtgggcaggtgtaggccaggagagaaaaggtggagggagaggatggctgtgatatgcaaggagttacaaagggacaggtttttatgtatcttgcatagttttcttatttaaaataggatttttgttcctctgcagaagagtagtcattttaaacatgtagatcatatacaacaagaaaaggagagcgggtgaagagaaaggggagatattttgattttttaaaaagactaagatttttaatgaaaatagtagatgttaacgtattttcacccttcatacctaatagtgccattttgttttgtcttactttatcattggattaaagagtgggagatttaggtatttggaggctgttttattcacataatttatcaggcccctaatataagcaaatgcgctttttttttttttttttttttggtcaaatggtaaaaactgccgcttaggtttagtagttttcataagcggcaaagcttcaaatctagtagcatcttcccattttagagataagaaaatgtagataagtactaaaaatttaagtgaaaactaattatacatgtggaacacaagggaatttataaaagtcaataccctgtcaatgggcgaggactcgcttcccttcattactcgtcctgtcattatgtcagttcccatcatccagaagaaccatttgccttttctgtttgcattgtcactagaacaatgaatgataggggaaatggaaataaattaagctctaattactccatttggtaattgtagagagctctgaggaaaaaattattctagctcatagttaaagtgaagtctaagaagtttttgtgatattcatttactccctttactcttcccctcctacctagcataatcaaaagctagccaaggtaatactttactttaaatgtggatctacaagctaagagttattgtttatttatctgattttgatggtaagagatttctatcctatagcattgtttccattctctgaaagtctcagattttagtcaccttataaagctgttccttaataaacatcttgttggctagatatttattgttgttggtggtttgttttaattatctgagcaaaataattcaccaaaatatattaaaatatgactaaaaacttgcaatgtatctacttatttctagatattaacattatacccaactgtcattatttgttctcttgaggcagtaagaatactgctgtttcttatatgataaaactatctttaactggtcatgtaacttacggtgacattgtcctaaagatgacctttgcatgataatcttttgaagatgctgcaagataaatatatcaaatgatttccctttttgcagttgtggcttgttgtacttttggtggagaggcacatgtttacattcatgaccttaaagttatctataaatttcaagggctgtctttcagaaaatcagtcctgtgtgtgtgctggtttcatgtacagtctgacgttgaaggacaaattatagggatacttttgaggtagcatgtgtaggggtttacatgtgtaggataaggtaaaggcttgtgttttgtaagatttttaaaagatgtttttcttaattgtgctaagattttcacaaaattgttttctctgtatctcaagggtcccatatgttttaatcttcagtttttaaacaatatctgaatcacaagaaaacattttacactttaggattagatgataccttgaggcatttagagaaatattactctaagataacctagatttctaataaattatacaagccagtttatacttctttcacaagtctacacttccactattttcttagttcttcaacctcattacctaattcagctatatgagtacctaggatgttcaagacactctggggaatacaaagaggaataaagcacagaaaagctagtcaggatgagacaggcatgtgattaagaggtaaggcatatgagaagcatccagaaaatgtgtgggatccccaagaagaaaaaaaattccaagatgcaggactgaaaaaggaataaagaaagcttcatgcaagagggtcactggctataaacattaaaagattggcagctgttgtttttgtaggtatgacagaaagaaatagcatggaggtgggagaatatgtatagtaataatgtagtcagttttggatagcctatagcataaaaagagtaggcaggtgaggtaagaccatggcaaggaaagttaaaaccaattatgaagtgtcttgaattctacattaagtaatcataatttggtaggcaggaaagaatatttaaagttttcttttctggcagaggaatgctagaaacagaattgggaatttagaagatttaaattggtagcatttccaatgcaattgtgatagatttcagacagtgagctaagaatgcagaggacaaaaaaatgtttcttagttgaggattcagtgaggtttcagtgtgaactgcttcagttgatactatcagtctgtgcatttgaggaactatagttcttttttaccatttgcaaacaggtttttcagatatctggaaaatatataaagtatttatttttagcccccaaagttgtgatttattgtactcactcaggtagtggcagctaaaatgatttttgggtgtaaagaaatggttgcaggtgagaacatgaaattcagaatgacataatgttaaatcttgtcctctagccaccgtcaataaatatgaacagccattttagatgaacggaaacatgatcatcattttataaagtacctgcgcatttaggtcctttgctatctcaatctactaattaggaaagaactatacagttctattccaagttttgtattaggcgtattgtcaactctcagtacatatttatgaacagtttataggaataacagccattaagcaaattatatatatgtgtgtgtgtgtgtatgtgtatatatgtatgtatgtatatatatgtatgtgtatatatataacatatatatactcacacatatttgctgagagtatttcagtaataatgaatttctttcagctaaacctaaggaaagtgatttcactagttaatacttccattaataagtgcatctgagccaatcagcagtcaatattaatttaagccttactgtgtgtaaagcactgtaaggcatatgctataaaatggtaaaggagtaatagaatttttgtcctgaaagaggcccagtgtggcctaaattctccttgacaaaacgtaagtacacagaacatgagcaaaatattatcagatgccaaacatcaaatgaatggttcagaaaagacactacagcatttcagtggccatagaaatcctttagttactatacatcagtaacaaatggtatttctgaaacagttagaaaaagtgacatttgcattttaaagcagattaatggattgtttcaaaaaattaggaataagtcacttaattttcttaggtattgccctccaagagtaagttacctcattaattgtactttgtggctttactagtgatagacatcattgcctgtatgacttgtcttcatgaaatttaatagtagtacataaaaatatgcaaactctgttattagtattttattctcatttacctaatgtgcaagatgaaagcaatttcaataccagtaaatgtttgagtgtattggtattttttaaagatacgttcataatgttctgattataaaatcatagttggtttattgttaaattagagccaatacagctgaaactattattcccatatctgtcttttattttattgttgctgaaattttattaagcatctatctatgttggatgctttgtcctaaaataacaaactattgcatataaaatccacattacattttcccaaatgagttttatatgtatttgtaatatgaattaaggaaatttgattgcagatatcttacattgtgtctattcctgcagcatgcaaagaattccaatgaagaatgacttccaatgctcaatatcacaatgagcgtttgtggtttgatatgtgtgtttgtctgttaaaaggcctttttttatgttaaaggattttattaaacttcaaaatgattaatatctattaggaaatttcttctttctggcacacttcagaacactttgccttgttctgttatttggccacagtcaaaagcccagataaaatcattgtatttaaaggtaatattttgtcatggtatggctacagtatattgagtctaatgaagggaaacatgaaaaaagagaaattggtactaaagcataagaccagtctctagtgaaactttaaagctataaaatttgattttgtagctttgaaatacgaacgttgatacatttcaaatatgttctttaaacttgtttcttattttaagttgataggtaagggtatggtcttttaaattttgtattctaaagcttccacatcattttagaaatatgatgggggaaagtaattggtaagtccttgactgaattatctagcactgctcaaattactttacatgtatttagccccaccatcagtctacctattaaatatgaattaataagagtttgcaaaataactccatgataaaaatctaatgattgcttataggtcttaaaatgtgttcaattttttcttgtgaatatgtttctgcaaaattatcctctcataaccgcccccctttaagttgctgtaatttcaaattgtaggagaaacgaacagtttttcagacatttcctgtagtgtaacagaaatctagacatcagaatctcctaattcagagtaattgaacactggctttggatggtcccatatgagcaagttagaaattgtggtttgtgtgttcacaaactgaaaattttgtttaaatttgcctgcacttggaaagccagaacaggtctctagttatcattagcacagaagcttcaaccatgaaagaacaaaggcacttctgattatattaatgtactgtttcatcagaaagtttaagaatgttccgttcaccatggagaaatataatttagagcactttaatttggaaggaattaaaaaaagaataacatcagtgctgcttttttctttaccccttatagagaatgctaacttttcaataaaaactgatcatagttggtgaattttactgtctacctatttagccattaatatctgtatctggtgtatataaattatagtattccctctcagtgtttaagaatcatggtgtaacatttttattttttgtgtaagcttgaacccctttgggcagtggtgaatcatcagtgtggtgctactgactcctgaataaattgtatgacatttcacttatttaaatatactgaacttacatattgtcttcagaatggtagagcagctatggctttaaggtccttcagaagttaaattcttggaaactaacaatttgatttactttcaggtcttttccaatggtcaccttggaagtgaagaatatgatgttcctccccggctttctcctcctcctccagttaccaccctcctccctagcataaagtgagttttgttgaatttggagatcacttgtctatgcatcaagatatggtagagtggttttgagaggttctcagtacagacactacatgatgaatagaaagtcattgatagtaaacagccagctgtatttacaaactaaattaccataaattaagatccttccctatactttgctggtaaccacaacatctgtgagacttacctaaactcttgaggttacatagagcaacagggagagaaagctacgcattccttgcatcaaagagggtagagtagcacaatgaggtatcccttcaaatttacctcttctcctcagaggtatcccattttatctcagcttcccagtttgacatcataaaataatctttggttccaccaggtttctcatttctcacatccattcagctactaagtccttttgattattcttttggagtttttcatattcctctaatcttctccattgctctagctttgcctcagagctggacaactgaaagagccttttatctgataatctcttatgatcggagagttagtatcaatgggtttacggctagtaaaatgagataactgggtatctcatttgaaaaatggggccccagaggcacactagatatctctcattgatatcttcccaagttaaaccaggataaactggatatcccaattctaattttcctgctctttatatgaagtcaggatgtctgcctttcctccggtatattttgttcactgtaactgagttcatttaatttaacttctgccttccccaggtcaccttcccactcaaaaactagcattgtttccctttttccattaaattaactctatgcacttctgctaacagtaagatcctacagaattttacccaactaaaatattttttagtgattcctaatacttgccctgtaattatatctggattgttttttctgactttgtgagatttttatgctgttcctcctgtgcttcaccttttcctaatctttatcctaaaggtccatatctcagactctatttctttgtgaaatgttctgtgacttcttcaattgtagtgattaagactgatttacattcctcttcctgcagtttatttcctactcatttaattatatactctgccatactgttttctaattttaatgtgactctccaattgaaaagattacaagactttgaggacaaaaactttgtgttctctatctcccataacatcttactgtatttgatatatactaagtaaatgatttgcatatagtaagtaagtacacagagaatacgtggatgcttggtttattgatttaaattttatctgctgaggtccttatttacaatagaaggtcttagagcttcttcattccttcatctgcagttcactgaactcccactatacatatcaatgcaaaagaaaaataaggtagatcccagccccccagaaatttacagtctactttagaaaataacattaatgtatatgaaatcattagagaatggtgtgcactaacatttataatgctaacttagtagtttcaaatgagtttggaggagaggctgttatagactttgtgaatgaaggatgtcatggagggatgggcatttcatgactcatgaagtacaggcacaattgggaaaggcagaatgtgagaaaaaacaagggtgtgaaatttggcatcattcaggggacggtgggaaactcagcgaattagatcattctccagtgggaacttctcttggaactgcgagatatttagcaggcataggagttggaagcaattatacatactctgggtagtaggctctaaatcagtgacaacatatgattatattctagtgctaaatgaactctggatatatgtgcatgtaataaaacatctaagctcaattacctttgataactcagagaacattagaaaatgaaatcttgctaattagagattaaatgttcacattctgtttattaaattcatattggcaagcgagctggaagttgcagtgtgcttcatttgtatttaacattaaatacctgcttctcctgtaaatgaagcaagaataacaaattgatagtaaaatgtattttttctaatacttcagttggtaagtgcatctaaaattagtcatactttctccctatttactcttgatttttccctcagaaacagtgcaattgtttcacttaactagagaaatattttaacagtgcatgcttgccagcaaattagttttcaattttgcatgctgcaagtcagccatagttagcagtacaaatgctagcttttaatggcacagttatctctccagtttatttttgtttctgactctgtgggtagcagttgttcactgtagacaatatgcaaagtatataagagaaagaaaaaagtgagatacataagcacaagcatatgcatatgctaaatatcaatgtccagagttttaacattttgacattttttatttaaacttgtttttaccttatttagattatatggtagagataattttatgccctcctttcttaacattatcataagcatttttcttaattgtttagttatgcattgtgtttattacaaaaccagcatggaatgctgatgtgaacagtagaataaaatcagactgtgtaccacacctgactccgccattaagtatttgtcttttttttttttttttttgagatggagtctcactctgtcgcccaggctggagtgcagtggcgcgatctcggctcactgcaacctctgcctcctgggttcaagcggttctcctgcctcagcctttcaagtagctgggactatagtcgtccgccactatgcccggctaatttttttatttttagtggagacggggtttcaccatattggccaggctggtctcgaactcctgaccttgtgatccacccgcctcacactcccaaagtgctgggattacaggcgtgagccaccatgcccagcctttgtcttatttttaacaggaaaacttctctgggcctttccccatctggtagaagagaggatcagtttaacttaaattatctccaaaatccttttgagattcagctttttaggttctatacagtgtgtttttttaaaggatactgatggcaaacctgacaataacagtgagtcaagagtcttggctgtggatggtcttagaacagaggtcttagcaaaatgccactcacagaaataggaatgtcagatgttcgagagttcatttccatcttagactcttggtatatgtttcaaaatcaggccaaagcaaaattacgcattcctaccaaacatacacttctgtagttcttacaaatgttgaaaactccaatgttaaatccaagaatgtcaaagctaacatttaccttacatttatactatgttgttataaatatttactgaaatagaattgttaaatatttgatattgtttactctgattcccatttacatgatgtcagaggctgctgtcatagtgtttcctgttaaactgtatctttgcaattatttgacttttattgtgtaatttgtcttgagacctagaagagtatgaaatttacttttaaaaaacatactgttgtaaaagcaatctgaaattatttgtatctatatacttaatttttctaaattaatgtttttttctaaatggtttctgcttaacatctttgacacttagctataaatataaaattttaagtaaatcctagaaacatgggtaattatttttttggagggagaacaaaataatcctatgtggattctttttactttatagtttaaattatttatttactaaattatatttattttgaaataatttgatttttcaaaattaaaactaaatgatactctgaatagttaaggaaatatttattttacttggcacacaatagattggcaaatgaacagaggcattattacaagtaataatggagtaattacttccaggtaagataatgttctgaaatgctgaggaatatctttttttttttttaagaattttttttgtgtgtgtgccttgtcttttagagatggaccttttgtacttttgatatattaaacttaggctttcaaatagccatgaatcaatattacttggttttgcatttttgtaagaaaggtttttttgttgttggaggtggtattatctatttttatgaatatatattcttataatatatatttttctaaagagataagtccttgtatttttggttccataaacagagaatacaaatttcacctaactgtcctgttttcattcagttgctttacttactagaggttcagtttgtacaagataaaatcctttatcctctttggaatttaagctctagttagggagaagagaaagtaaacaaataactatattgtatattgtcagctagtggtaagtgctaggaggaaaaataagcagggaagaggataaataatgatagagaggtttatactttagatgaggtcattaggaaagacctctctgaaaggctaatatttgaacagaaacttgaaggaagtaagggagcaaaccatgaggttatctgtgtgaagagcacagaggctggatagaacacaagtacaaagcaacttcaaatctgtttctccgatttacaaacaagttagtgaaaatgcttataagtaaagcttatcttaaagcttgatagtataccacacagacttttttttgatgtcatgaaagacccttgaaaattagcatgtatatgataaaatttagtgttttgaggaaatgatttatatgtggcacatgtgcaaaaatcatttcaaatatagctatattttgttttgtctcttctctggactatttatttgagttagacatttttccctgttaggattgggataatgtaatataagaaatatggtgtaatgtatagggcaagctctaaagattctattttaacagaagatattttttcgttacttgccttcagatactattaaaggaagatagattcttatatgtagaaaacaagcttactaattaagcatagcattggatactatctcctgtgctggcgtgaaaattcacttgtttcttggtttgtttcaagtgtgcatatgtagaagatgaatgtatttatcactgaaggctcaaataactaacacaatgaatttaataaaatgtccaggttgtggggggggtggtgactatgcatctttgagagtgtatgtccctatgtattaccagtgtattaactcagtaataacagcatcagtgcagaacactccgggaatgtaagatgagaatataaagggattgcagtaataagtgtaatggtaggctttaatgtggagtcagccaaatacaatttgttcagctttattcctctggtatcctaaaaatttcccgtaagtttagtcaatgactgaaaattgtcccatgccccataagatagaaattttttctactgccaaatgtcacatacatggatagataatgactaaatataaatctaattattttacctgttatttagtagtaagtaaaattaaacctgttttttgaatgagtttgtagaggaaaataaaaccccacatgtaattccagatggtataattagttacatgactctagttttttattttgctattttatatacaacttctttatctcatttgtaccatcctcttctgttattttttttgatagaaaccagttttttttttcagaactggataagattaatttttaataaaaactatgtaatcttgaataaaatacactgtaatgttattcttttggtttatttctaatccaaatagactattatactgatattaaacattttcattaaaaaacataagcagaaaaataaaatctgaatctttagaactttattaaaatggtgataaatggaacacctaagtatttttttcatatttagatacaaacaccacttgaaaactattttttcacttctagatataattctctaaaatctgtgtaagttgacaatttatactagtaagttttagcaataagccttattattccatgaagtattagatgagctttgcttttcacttcattctgaaataatctactgatttgtggcaaagcaaaagagtgggggaaattactcgagaaattctctatcaatgaaggtaaaatatcaaattagccacaacgtatgtgatttaaaaaatggtccattgttgactcataatgaactgcttctttggaaacttaaatctttggagggaacctgcaacaggcagatcttagaacatttctgatattgaatagttgttgaatgtttagtgaaaaatactgttttctttttacatagtgtatgcttgaattgcatagaaagggattcattataaatgaaagtatcttaggcatagagaggatgtacagtatatatttctcatttcatttggtaatagaacccattctggtccttgacttagctaaattgatggctgtgtttacaggaatttatggaaaagtaatattataagtctctcccagttccagtgccatcagatcaccattttgcagcccatatacttaacttcctttaattggaaagtaaatcctccaaagttaaaccataataggtgtaataatagattattattaaggcccttagcttgtgctgtaggtagtgacactggaccttttgtcactatgcttttgtctctgtgcttttgtctccctgtaacgctcatgtgaattctaaagttgctcaaacaacaagaatttaaagatcagtattgaaatttttttcaaagataggtatcaataaacatacacttgaaaaatcttagtttttctttgatctttgaatgtcctatctaatgacttagataatatggttgaaacttaaatctttagatttttcaaaatgccttcttgtaatggtcacaaagaaaagcccctaaaattgtttctgttctaactaataaaaagaaataaaaatgaatgttaattcaggcatgtttgtttaatataccaaaggcctcttgctccctctatagaaggtgctgcaaaattgcagtcacttagtttttttgttttttttttttccttcctttttaaattgaacagatttctcatgaggttcatgatgattaacaaaaagatttggatccatgtgtgtattcccaatgccttgcaaactagttggtcgtcctaaagtgaatcaggatgagtttgtgcatttctgccttggcatttttcattggcttcagccagggttagattaaactctggtagcaacagttacgaaaaacattgtttatgtttgcccatttgtttgggtttgttttatttggtttatttactcttatggataagtgaaatgcttaatgtttttgatattaggtgatggttttactcattttaattctcttttatttagccagggaatttaaaccataaaaataatgtacttcaaagacttaaaaataagttctctcattatctacatctaatcattccattcatttctagctctcagttgttggtaggaagaaaaacctaacaacttcaactataatttcacaggatagttaagttttacagaattaaactggatatttttccaactatagataatattcacaggagacaaaaagtttgaccattctataaagacttctttaatatataaaacaaccatgcttattattgtagcatcatattttacccatttaatttaaattggaacaaaatattaatattttaatagatttggtttgaataaatttgtacattttgtcttacaaatccaacatctttttattttattcgacaggttactagtttttcctattgtgccatttaaaattgtgaggatgaaaattcttttatcccatcaagggtcttaacaaaagattgaaaattgttttcatttgtatttgatataagaacagcttctctgatgataccctgtaattgaaaaatgaacataagtgataaagtagcttctttgacttgaatatgtcacatcagacttgcctgttttgaatattatgcttaaactagattggattttttttcccctggtaggtgtactggtccgttagcaaattctctttcagagaaaacaagagacccagtagaggaagatgatgatgaatacaagattccttcatcccaccctgtttccctgaattcacaaccatctcattgtcataatgtaaaacctcctgttcggtaagagtatgggcagatttttgccacttacatctgcataagcattatcatttgtaatgtttgtttttaaacaattgattcacgtctaattaaaaatccttaatttccagctcaaatccttctcttcctattataccatttccagcattacttttaaagaaaactaaaagatgcagatttctcattaatcaggaagtcactttattttatcagttctaaacacctatctcatgaagaaaaattagtgctcagaaactaaggtattattctgaccttccttagaatttttcttcatgatgtacatactagtataatttaaattcattttccttcttgatgtacttgctacctacttctattcagattttgaagaagtgggaaaaaaataccaaggtgtttctcttaactttttgtttttctatcaagtgctatttaccttcctttagatcaaataagaatgtgaggaataggccaggcgtggtggctcacgcctgtaatcctagcactttgggaggctgaggcgggcagatcatgaggtcaggagtttgaaaccagcctgaccaacatggtgaaaccctgtctctactaaaaatacaaaaatgagccgggtgtggtggtgggcgcctgtaatcccagctactcaggaggctgaggcaggagaatcgcttgaacccgggaggcggaggttgcagtgagccgagattgtgccactgcactccagcctgggtgacagagcgagacaccatctcaaaaaaaaaaaaagaatgtgtggaataatgggggttttttccttacttttgtggcttattctcacttacatggggatagccttggtctttgacttggaagctccatcgaggtaaataagagttattaataatgggttgtttgtattgaaatattactttatctttaagtaaaggcatgagtctgcatttatattattgaatttataaactgaaatctattatttctgggtttgtttgttttacctgactgaaatatatgaggtactcagtactcccagctacaaaacttactttctgagttctggtttcctttgtataacattcctggggccatgcttggcacatagaatagggctcaagtactgctggtggccctacattccagcatctctccatgactgactgagggataggggagatggcaattacttcagtcatctgtgccatctttacttagtgtgccatttccttttgaggtcaagtcaatcaactgaaaacattttataagtacagtgttcccttcttttccaatgaaaaactaaaaaatgttttaatgtgtttcttcaggcatctcactgaggtaggaaatgcagcacttggaaagagaagcacattttcattttaagcagatgtctgtcttaataagtgaccctggttagaattatcaacattctgctgaattattacccagaattgttaatagtctacagcgcaggactttatttttttaaaagcaagaacctaaacactccttgctattgctggtgtttagataagacatctgttgataaaatcatatcattgagaagacaaagaaataacgaggagctaattttatgtatcagaagaaccaagtagctagtgatgtatttgagaacaaaagatattccttctcatcaaatataagttgttacaattttcggttctttggctcttacaaatgtgcagtaatttttaaaaactaaagtaggatgagctttttttggtctctttgggagtcttattttttttcattgctggataagtgaggagtataattttaatacgttaaattttaattgttacatcatattggatgtgattttttgtggcagagctcccaaatcttgaaaataaatttgaattataaccatcattaccatttttctattgttacagaaaagtaataaacgttgataatccctaaatgtaattggagtgaattctttatctaatttgttcttgaaagctgatggatgaagtatcttcttttgtgctctccaaagagctctttaagcttaacactttctttccctgtgtgtatttttccccctttggaacatcaggagaagtgaattgtcaatatgtagaaaaagtgacccagtaaatgagtaattcaatttaatttcagtaaaaatccatcattattatgaagattcaatacatgataactatttttaaatgaactatatctggccccttaaagagaagtggccaccagagagaatagaaatgaatttcagatgaagcattcttgcattatctattcaaatatccgtctcttccattacatacgcacttttactttgctctaaaaattcagagtaaatcagagaaaagtaaaatgtaaactctgatttctatagctctttgtcagttgattgttatagagctatatgctgaaggcaaaatatgctccttatcttctcttcctgctgctatcttcccatggctcaattttaaccattgtgttcatagtatgattccgaagaattaataccaataatttggctgggttcggtggctcatgcctgttatcccagcactttgggagggtgaggtaggcagatcacttgcggccaggagtttgagaccagcctgggcaacatggcaaaaccctactaaaaaataaaaaaaattggctgggcgtggtggtgcacgcttgtaatcccagctacttgggaggctaaggcatgggaattgcttgaacctggtaggcggaggttgcggtgagccaagatcatgccactgcactccagcctttgcaacacacagatacacacacaacaaaacaaaaaaagccccaacaactcaagcatacttttctggtaagtagtaccctttacaaacacattaaaaactgtacttgtcgtgtacccaaggcctttgctaaagtcattttctgtagtgtcagagggccagaattttgttcttggcagtggtgaaatagtaccacaggctctagttctttgaatgttcctgtcagaattgtaatggaattattgaaagttcaataatttttcttcttttatgtgctgtagcttatttttattacaaggaaattttaagttacagaagcaaaaatatgatattaaatactatcaacaaataataaagtcattgagactgctatatgtttttgccttggcacatacatctttttttacttcaaaaacttgaccaggttctattgaattcttccacagagataagttaattttacatagtgtttaggatatcaacaatttttgtggcccttgtaattcttggttatagtttaaaaaaagagagactgtgttacttgagatatttacttctacattttaaaataagggatgagtatcttgatgttattactggtaattttgagaaaagaaaaatatatgttcaaactttattaaataaacaggaatactagttccctctacctctcaagttacttttaattggaaagtattctccttatataattttactctgaactgtcctttaggtcttgtgataatggtcactgtatgctgaatggaacacatggtccatcttcagagaagaaatcaaacatccctgacttaagcatatatttaaagggtacgtatagaatataatttcctttgtgatgtacatcttaatggtcagaatttaaaggcaaaatttcatgccattgtactgaaaatacattaaggttttgtgttatcctctaggagatgtttttgattcagcctctgatcccgtgccattaccacctgccaggcctccaactcgggacaatccaaagcatggttcttcactcaacaggacgccctctgattatgatcttctcatccctccattaggttgaaacctttaaaaaagttttgaacaacccacccctccttcttttaatttcagaattttcagaattcagagttcagtataacacagactcactgggttgtgaatttgcctgaaatttgaatgggttctccaggtgccggtgactcccaagttcacgagaccattactccatgtagatgattaaggtagtagtgtagtagttgggcatcagtcaggttttaagcaagttgttttgtccatactaaatgtagtctaaaaacacatgagagctttgtgctctagtagttttgaagtgatgacttgaagtgttgagattttctttaagtataataattcttaataaatatgaacttgcttttcttgcagcatgagcaccagttccacttacgctaattaaattatgcaaaattaaatagttgtatgtagagaactgataataaattctgttttattctaatcattacaactgtaacacattcaaaaaaatctcaatttccttgtttcaaattataataatgaagaaacatcctatgtgtatttttgtttgtatccacaggtgaaggtatatgtaggtgtgtgtatatgttgaagttggctggtgccactgtcactgttaatttcattaattctaattaggaagcatctcaccctgtttttagaagacagaatgtctgcacaccttacataacgcttcacaataacaagtcactgtaacataaaataatatatgatgaaagtcaatttacaagcttttctgaactggctgttaggccaccagaaatacgaaatgaacctttccattttctcacaagtaccactgactagtattttgaatgacacaattgcagtatcttttgctcctgttctctctgtagttcaggactttattctcacctacatcaattacaaaaggctcctaactctgttacctacagtctttctctcccttccacttcttcctgcacacttgtttttgacatattacccagatcttcatcacctggataagcattgttcaataaagctttctgtggtgatgtaaaggatctgtatatttgcatatgggttaagtgtgattatggaactgacttttcattaaatttaaatagctaaatgtggatgggtgactactttatatgacaaagtagacagattttccaacctgtctttttaccttgacctttttctaggtcttcttatgcgtgtcatttttttcttcatactgtttactctacttagacgatcctgtccttgcatttgatgaataaatttttgagccttctgatatcccaggacttcctgttcttcaacacttcactgaataccacttgtctacatttctctttcctcatccaatgcatatgtctcttttatgggaccaataaaacactttcacttgtaaatcatacctatttgtgagcttttttttaagctcctttcatggaatctcagctccttgagtcagagccttataattttgattttcatatcatgcatgagcctggcccagtgtcagatgtttaagggctgaaaaaagatttgaataaatatgataatgtaggaaatagctgaaggttaaaatgatagcaaaactctgtcttgtgcatcttcagatgtgttaataagaaaaatatgattaaagaaattagtgtgccaattttttctaaagcaagttcagtaaatagtaatatctttttttttttttgagacagtctttctctgtcaccaggctggagtgcaatggcacgatcgtggctcactgcagcctccgcctcctgggttcaagcgattcccctgcctcagcctcccgagtagccaggattacagtcacgtaccaccatgcccggctaattttttgtattttagcagacatggggtttcaccatgttggccaggatggtctagatctcctgacctcatgatccacccaccttggcctcccaaaatgctgggattacagacatgagccaccacgtcaagcctcatttttctttaaatatgccattatgtttaaatcattcaacttaaaagtgtgaatttttattattagaatatgtgtttatgtataccctgtctcattcctaaagtattttgagatagcttaccaaacatgtgctttttttttttttttttttttttttaaagactcaaggtaatgaaaactatgagtagaatagtaaggtgtgacaggggacaaataagtagatataaaactatgctgcaatattctagttattaaagctgggaaatatgcaaatgtaagtagtgcttggaaccagagaaggttctatatttagctgttcttctgtagctaaatctgacaaattgaaaaatatcatattctctgctctaggtacattttatgtatattttgacagcatatcaaatatatgaaacattaggttaaataaattaaaatccagtggaataaactatatgggataatctaaactattctttgacattaaattatatgtatttgaggtgattttccagttaaaggctgtgaactctttttgctacacagaaaatcctgttttcatagtgtgactgataataatttttagttcaaactctgagtcctaatattataaaggttacaagtgaactatgagctgtttcataagttacaatgctgctttttataaaaaggcctgatagaaaaagtttgcatgggtgtgtttgtacgtatgtatgtatgtatatgtgtgcatgtgtgtgtttctctccagactctcccacaaaataattagatcccattatcaaagttggtgaactgctggataaaccctgcgagtgaaattctttataagcagcaagagaaaatcaattattacttttgttagatgctgtgtattttgattaatgaagttctgctgctgatatcgacctttctttaaatgcaggtgaagatgcttttgatgccctccctccatctctcccacctcccccacctcctgcaaggcatagtctcattgaacattcaaaacctcctggctccagtagccggccatcctcaggacaggatctttttcttcttccttcaggtaggagggaaaagccaaagaaaactattcacttaaagcaaaaatatttccaaaaccatactatcaaataaatgttagtgattcattagtctctacctccctagcagaacagaaaaatccctgggtggtaaaagtagcaatcgtgggtacgtttgtttgtcagttgattggtttaatgccaacataattacagagatggaaagagcaataaggaactacagtagaaatgatgctgtagagattgtccagtccagaaacctccttatgttacaaatgcaaccctgagaaccagaactgctaaggggttaggctaatagtaatgggaacaatatttagactttgtcttccgattcccaatgcaatgttttttaataggtttttaaaattttactagatatgccttagtgtcataattttgttcaaaacataagattttggtaaattatgttgttataacaagaatagagaagtttttctgaaatagctgcattttattgttttgttgtgatatttttaatgcctcagtgtgtatctactcactaattattggtattctaaggaaaactaattttttcttagtaactatttaatattattatttacatatgtatatattatataatattatttgtttaatattagtaaactaattttttatattagtatattttaaaatttcaaaagaggatctgaaataaaaatgaagacttaataaactatctgttgcattagttagaattatcaggaaaaagaaaaaaaaatgttatatggaatctgctgatactaattaacagttccagtctgtcttgttagtgatactgtgccctgaaacctttgcctccttggacttgatttgggaaaatacagggtaaagatgttctttttttcatagttccttacatttctacatgagataaatcatgaaaatctttaaaaagtgctcagtttgtcctttagctacgtatatgcctcatggaaacttgagaatctttattcccaactgattcccttatcagcttcctcagttgattattagtcatgtctaccattagtttttcttagttttttttttttttttttacttggtttgatagtttagaaagtttgaagagatttgataagacacacaagttatggacgtacaacttggaatacacagcttcaatttcttaaagtggtttatttttcaagaataatcttctgcttttacatcagtaaatattgattgagccattcactgtttacccatttgtgatagatgcctcctgacctgtggaaccttatgagtttactggattctgccaatgaaagcactagtgtcataatccattccggtccaagcaggaagtatagtgtatgagtccgttttcacactgccataaaagcactacccaagactaggtaatttgtaaagaaaaggggtttcattgcttcacagttctgcatgcctggggaggcctcagaaaacatacaatcatggcagaggtgaaggggaaccagggcatgtcttacatggcagcaggtgccagagagagtgagcaagcagggaaaatgccagacatttatcaaaaaccagatctcatgagcactcactatcatgagaacagcatgggggaaccacccccatgatccagtcatctcccatcagttccctccctaacacgtggggattacaactcaaaatgaaatttgagtggggacacagagccaaaccatatcataactgcttgggcttttattcatatagttagttacatgtaaacactgctgtatttcgctattttttttcacttattcaaaactttgtcttatacatagactttaacatgatttttagaacaatgagtcattccaaatcttagttacttaaatttcctgatgctaagttcaagatagtttctggctctcctattaccttttatatgcgtaacttaagccccaatagatggaactttgatgatgtggcttttctgacaaataaagtcaagctttccaagagctataataaaagagaacattttacacaaatacacacttttacctgtttttgtcaaaagaattgtaaaaggttttagttatttattttatcttaattgttcatttccttttatataaaatcttcataaagaaacccctcaagattaattgctaaaaaaaattactagtttaaaatgaaaatgtcccctcttattagctaaaatgcaatttttataaaccgttgtatttattttatagatttgcctgttttgtgtttgcttggctgccagggagctcaacaacacttatccttaacttagagtgtcaggctagcatgggagtcagggcaatgtttttcaagcctgttgactctctcttgactttcattaatagatggacatattctaattctcttcccaataatatcaacatcccttataataagtatttcttaaaaaaaaaaaaaggcaacttttttgtttccttttccagtctttcataatcatttacatgacagatttctagtctggtaccagatcctttatgactttttttttttttttttttttgagacagggtctcactctgttgcccaggctggagtacagtggtgcgatctcagttcactgcaacctctgcctccaaggttcaagtgattctcctgcctctaccccctaagtagctgggattacaggtgtgcaccactacactcggctaattttttatatttttagtagagatggggttttgccatgttggccaggctggtctcgaactcctggccttatgtgatccccctgcttcaacctcccaaaatgctagaattgcaggcgtgaaccactgcacccagcccctttatgactttcattgtgacaattattttgattcaaatttaaaaccgtgtgtattagctttcctccttttcaaaagaaatattttaatattttaatgctattgcatatcatagagcataaagatttttttggctgataaatgagcatttgagtattgttttgcaaagtatttaatacattatactgtctaaagaaatgtaaaagattcattatagcagttctccctaagaattgactttattaagaatatgctataaatgctaaagtttaactcagtagttttagaattataaaaggtaaataaaagggactgcaaaatttaaacaaactctgtgagcattttaccgttgttttcgttgttcagtctgtaaaatcttagtctggtgtaatgatacatcttttctaaacattattgagatttggtttcctgaggaaataattatttctaattaaagacaaatgataggtgtcttaggaagagaggttgaattttctcatgatattatactaagtacctaatcaagcctacatttttattccagcattcagtgccctgcacagttgggccaggttcagcttttcagccttatagctcattgacttctatatagtagtgattgtcaaattgcagtgtcctatgtctctgcaaaagtgcctcagtactgttgtaggatcaagggggcagggcaagcagaggcagggctctcattcttcttttatctcttttctattttaggccttcatgtaagatttcttttggcagaatagtaatgcctacagctgtacatgagccctcagttttggacaggccaatcatatcttaacaaaacctgaagtccccaacaaaagctttacactcttttgtctccaatcccaaggctaccactagtgtatatgtgcttttttccatattacaaaaaagtacttcctttttgctggtagattgaagtagacacccctacctctactttgtgccaggtcagggctcaagaaacaaagcaaagactgtatttaagtcctgctcataaccataactaggtgtctttgtgcagtgcacaaaatacagtgtttttgtcagtctttatgctacctttattttgctgtttctctaacctgtaatctcacttgaagatcttatctaatcttaaagtcacagttcaactctgaaagctagccaaattgactttattaaagataaatggaagttttattcttggatccagaaatgcaactgcataagtaaaatatgaagaaaatccagatcattagcaacaattgttgaaaaggttttaggggttttgttgactacaatctttataaagcatcatcatgatgagaaagcgcatgccatttggggcttgaactcacagaattcaaatctgaggagtgaagtcctccacagtactcagcctttgtggagaccactgtgttcagatgttgaagcattaatgggctagagcagcaattctcaaattgtgttctccggattcacaacattagcatctcctggggatttgctttaaaatgaaaattcaagacttaataaatcagaaaccctgggaatgggactcagtggtcacaagccttcctggtgattctgatgcatgttcaagtttgaaatatactgggctggggtattctcaaaaaagtgcaaccaggatgataaagtaaactagagtggattaaaggaactgagaattggctcagagaagagaagaccttggatgtagacgagagttgtcttcagttacagtatttgggaaagaaggattatattttttccatgtcacttcagaaggtaggagtaagatcaatgggaaatgttaagaatgaaaattgcattcatcctacaaagaagtttcctaaatcattacgaattgttctaccttgagtgtagtgagttatctgacactggaggatttaaaccaatggtagatcattacatagtagagatatgaacatgagctaaagcatgagggcagcaaagaggggagaactttgtttcacctaaatggctcttcaaaccttttttagcattagtttctgctttgatatactctattaaaatttgggggataattgataaatcttccaggtggtttatggatggccagggaggaaatttgccattgttttaattatttaattttatttgcctctgtttttacacttggtaaaaatttggaagtgtttcagatagtgaagaaaaaaaagaattaagaaaaacattccaggccaggtacaggctcatgcctgtaatcccagcactttgggaggctgaggcaggcatatttcttgagctcaggaatttgacaccagcctggccaacatggtgaaactccagctctacaaaaatacaaaaattagccgggtgttggtggctcgcgcctgtagtctcagctacttgggaggccaaggcaagagaatggcttgtgcccgggaggcagaggttgcagtgagtcaagattgaaccactccactccagcctgggtgacagaacaagacgctctctcaaaaaaaaaaaaaaaaaaatccatacttcctcctcctaatcattgataggtatccttcctttttttttgttgtttttttgtttagttttgttttgttttttgcctacgagtatgtaagttcacatttatgtaaaatttatttctcatagtatatgctatttataaccattttccagttaatatgtcatgagcaatgtatatagttgttaaatatttgtacacaatataatttttattgatgtatatttcctcatttcttttttaagtagcaaaccatttcctcccagtcttcccttagttttttataatctctcaaataagtactaaattttcagttttgcagtgctgtactataaatcacaggcagtagtactttgctttttacaacagattagtctctgtatgtgtatccatttatttctcaaacacttatataagtgataaattggctgtgatcatttcagtttgttttaatcctgtggatataatatttttctttagtttttgaagaatttattttagaaaagctttattactttacaaagttttcttatcaggggacaattggtaattattatactctgtgtagcaattgtgttatatctaatctctttccctttaaagcctgaatgcttccaactttataatttgctttagagagcccagtttaccctatggctgacaaatagcaaacttaggatatgatgcaagatagaacatgataatgattcaaaacagaaccataagcaggtatttttgctatttataataatattttgagtgtatctagtaccttttaaataatatagtttaatggaagaatatagtacagtggtatattttatagtctatgtatggctctgaagtgtatccagagtttactttttaaccttaaataaatagatgattagaaatagcattaagtgtatttgacaaacctataaatttcccgtaaagaaataagcaagtgtatgtattgtaaaagacagtctttcctctgacttaatgttgtatcaggggcatttagagtctacaagaacctaaagtaaattttatgaaatatctagtgcaaaatctttgggaaatttcaaaatttatgctgaaatcaccatatttgtttcctttggtttctctaacaaaccaaaagatcaacattgtctcatgcgatttatcttctcattccttcctaaaaatatttctggaaaattaatggagctggaccaccaattcttcaaatattgaaaactcaaaatctaagagttattttaatcttgaaattaatgaaaacaagttaaagagccttgtctaagtcaaaaagtcctcagcaaagctggtgataattattatactccaaaaaaggtgaaaagataatggcttcaaatcctgccttacattatccagtcaaaaactaatataaaaatagtcaatatttaagcctatgttttcatcgtaagtaatcaaatacttacatattattaatgtctaagggagtggaagttaaaacaatgaaattcaatcgggtcttctttaatatttacaatttttgctttacattagcaattcaggtttcactgattttaaaattgtgaacaatctgaatttgtgtggatttatttgtggtagttaaaagtaaatattaagtgcaagctatttgccaagagtgttctaggtgctatgtttgatttaggaggtataattcaaacatgagaagtaggaaaagatccctcagatccctgtcctcagaagaattgacggtactttcagagatatcgacaacataaaagtactatgagaggaaagcagcggtgcctgaggtgggagtgatagctagataaattattagtgaaccaaggttttcagatgtaatgtttgtctactcaaaaagggaatcaattctctaagaatttaaacccatataatactatgaatgttaaaccagttgggtttatggtattaatgatttaatacagcaacactgacaaaatctctttttctccctttagttccagttagtaaatatcatattttttactatttcagatgccccgtctctgactgccaaggtggtaaattatcacattttactgtatattcaaatgttaattactaaatggcataattttaacaattaaatttactattttgtgagccaactaacaacaatgatgttaagcataggatgcccaatataataataagcaccttgtatgtacagaagattttacatgcacaaattcatttaatccacacaaatccgaagtttcaggtctgttttacaaattttgtatgcccaatgcttagagagatcaagtaatttgataatactcttatagggaggatccaaacccatggttttatgtatatttgtttgtttgttttttgcttttactttagaacagtttctatacattgtacaggttggattgggacagaaaataaaatttagaagctgtttttattgtcaacaatcttataattaaatatatctgcaaaatataaatataaaacaagtagtctttattatctggaaataaatgtgaagagcatatttaagcaagtgatgaataaattagaaaatatgcaggcagtaaaaaatggttaatatcagtcatgaatttaattttctaatttatttttgaaagccataatcttcataaaataattctagaatttttttcttcagccaatcaacagagatcatccttttaatttgaaacttgtttttatttttaagatccctttgttgatctagcaagtggccaagttcctttgcctcctgctagaaggttaccaggtgaaaatgtcaaaactaacagaacatcacaggactatgatcagcttccttcatgttcaggtgagttggctagtaacagtaacaataataccttattgttatatagtgctttttgcttttcagaacaccttcttattcattatataatttaatgaatgttgtccacccaagaaagtattttgatcatcattgcattttgcttataaagctggcattgtgagaggaatggctacagaactgcctcattgaaaagaaaaatattaagcttaatattatctttgatcactcagtggagccacttctttgattcaaaatgtattcattatctaactttcattttgtctcagatttaggaaatgaggaaaatctctttgtacattgcaatgctgttttatagcaatctctatggaattaatactggcaccaaactattcattttcttagcttatttagggctccaaccagtgctgcactgacagccatcaaatagaaggatgtaccatttttgtaaatacaagtcatactcacaaccgttaataatggaatgctgcttctttgcttcttgaggaggctttccctgaacatatctaaatagctcctatcttctgcagttattttctttccttttttgctttatttttcttcatagcacccgtcactacttaaaattttgttattcagaattcatttggttgattgttggttatctgtctcgtctgctaaagtattaacactttggagataagaatgttgtctggttcactgcttgtcctagtcagttcaggctactataacacaataccatagactggattgcctaaacagcaaacatttatatctcacagttctggaagctgggaagtccaagatcaagctaccaacattcagtgtctagtgagggccctcttccaggttcatagataactgccttcatactgtgtcctcacaagggcaagggagtgctctgggatctgtttcataaggaaactaatccctttcatgagggcttcccctgcataatctaatcatctcccaaaagcctcccctccaaatatcattacaaaagggattaggttttaacatatggatttgcagggaaaaggggacagacattcagtccatagcattgctttatcctcaagtgtccaacatagtgcccagcatatgtctctttgatggatagttggggatggatggatggatggatggatggatggatggatggatttgagtggacaaataggcaaaaggagggaagaatagctgatgtctgtattaaactaaatgcaaatatctgataagcaatatttttgtcacatatttgtgaatatcagaagttttcctatatgaacttttgtcttatttcaaaatttttttaagctaaaacctcagttcatagaagacttgctaatactattagcaatacattctgaaacttctgaatcaagataattaatgagctgttttaagaattgtcagtacggtagttcttacgtgctcgatgccatgcatgggagatgcagaaatccctgtgtatttatatgtttaactgcttgcatgtaactcaggaaagcatagaaaatctttttaatcttttcaaattttggccagtgttctcttatcagtttatttctagtcattctaaggtttcatatgtatccatgagtagcctgtaattccagtcaaaataatttgatgacaaaacatgaaagtcaagaaagaaagacaatatctgacagcttctatataatataaggaagcaattttttttaaagaaaatagtattaaaatataactttgagcaaagtgctatgactgatttaaaataacatattcagtaccaccagctctggattaaaagaaacctatactttagttaggggaaaacttgtagccaaaacacagtgttttcacagcttctttacagttttctccataataagtgggtgttgtagagcccagaggaacatcattcacatatatgatttcaagcagtatgaatccctattagcattacactagaaatgtctggaagaacttcaaatcacaaaccttgttgaaatatccccgaatagccatttgccagaagcctgaactggcttttacctaagtaataaaagactcctgactattactctgagggcccagctagctgtaacatcaaatatttcaatctactccctaaattctctttacaaacacagtcaaccacagaaaataagatacttttttccaacatatgtttgttcacatgaagttcacaggcctaccaggctgttcactagtttattttacatcagcagagagactgagcttgccttctagatgaggtctttccattcaacccttgagactgaatgcatatgcgcctttaggattctaatagctcttattttgcagtaattaatctgtttttattaaggcctttttaagatgaccaaatggggttctggtatgattgctctgccttatgaattcaagttctgttatcacttatggctgtctaaataattgatagtcatttatgaataggcttctatggaaagtatatttctaaagaagtttaaaatgtagtttcattgattttaaaatatctcccttgttttcttatctaaaaagtatgtctgcatgtatatgtatgtctacatatataaagagccttctaaatgtttattcctcccaaagaaaatattttatgcttttcttaaagtttttctaaatgtataattgaaatttaaatatatgaacgtatcataggtagtccagatataagaagagcttaccagcccatgttaaattcacatatatcggtatataggacaaacatttttgctagtaatctgcttgtttctttacatggatgtattattcacatggggcacatgtctcttctatctatgtgtgaggttttacaaatttctcagtttgcttttctcttgttgtaagacatattgtactacagtttgaataccattctttgaaaactaaaaggctgtattaatgaagtgcaccattcactcttgaggtgatttttcatattgttagtatttagaaggaagttcaaggtaacacttgaaaacaatgcttgattttagcacaactcaaatgtgtttgaaaccattaaaagaccttattgccaaataagccaatctcattataaaataaaggagatctcattacaaaatgaattaatttcaatactaccattagtttactagcttaaaggagaattgttggaatgttgaatacattttatattaggaccaagtattcaatagtttatctctgttaagatctcaattggaaatcgtggcttcacttcacgcaagggttggaattttaaggtagattatgtgtctttaagattttgtgtttcaacaaaggaaatggcaatgttgagttttcccacagtttagctatgtgaaatactggggcttacagacagcttcagtttgaaagccagagaacctagagttgttttccttacaaatctaagattaaataaccattttctggatatatttaaaacagtgtatgtgaagatttttttatttgtaatttagtttattaaatcatgtccttctataggcagtatttctttttttttgagatggagtctcgctctgtcgcccaggctggagtgcagtggcgtgatctcagctcccagcaatttccacctcccaggttcaagtagttctcatgcctcagcttcccgagtagctgggattacaggcatccaccatcatgcccggctaatttttgtatttttagtagagatggggtttcaccatgttggccaggctggtctcgaactcctgaccttgtgatctgcccacctcagcctcctaaagtgctgggattacaggcttgagccactgcgcgtggccagcagtatttctatagaggcagtaattcaaccttatggcataaaaatgaatcccagaattaattgatccaacttctagtagaataacaaagttaatcataatgtgtttgagatttcttttattccttgatcaattaagtgtatttatatttttttctaattctgttattgttatagttgagaaggtcagtagtctaagagttttgatatctgtcccaagaattgtcactggtttactaagtaaatttagacagtatgtttcagataatatatacaatattattttgtctaattaaaattcgttaagtttgttaagcatttactatagtcctgatgctttgctaagtattttagagacagatatataattttttttttttttgagacgagtctcactctgttgcccaggctagagtgcagtggcacgatcttggctcactgcaacctccacctcctgggtttaagcagttctgcctcagcctcctgagtagctgggactacaggcgcccaccaccatgcccagctaatttttacatttttagtagagacggggtttcaccatattggccaggctgatctcaaactcttgaccttgtgatccgcccacctcggcctcccaaagtgctgggattacaggcatgagtcaccacgcccagccagatacagatatataaattttatataagttaatattatatataattgtatttatatagttatgcagtaaaatataaatattcatgttattttatttaataatgtatattttatattatctgtttataattatacatttatatatttgatattgttatacaaatatatggttatataatatggtatagatataaatataaatttatttttactgtgtaatatagaaatagatataattttatttctcctaaccactctgaaatatatatatgtgtgtgtgtgtgtatatatatgtgtgtgtgtgtgtatatatatatatatatatatatatatttatttatttatttatttatttatttttttggagacagagtctcgctctgtcacccagcaggctggagtgcagtggtgcaatcttgtctcactgcaacctccacgttccgggttcaagcaattctcctgtttcagcctcccaagtagctgggactataggcagtttttatatttttagtatagacagggtttcaccatattggtcaggctggtcttgaattcctgacctcaggtgatccacctgcctcagcctctcaaactgctaggattataggcgtgagccactgcgcctggcctgaaatagatactattaatgtcaatttatagaagaaagaaagacataacaaagtttagtaactaactcaagctgctgcagaaagtgtaagcctgatagaatttacatcagtttcagttttttaaaaatttgttaataaagtttatgttgttatcccatcatcatgccagaattaagttagaaaaaaatgtacacatgcatctcacgtctccagactgagtttggagatgttcagtggtaaaatcatgataatagtgatggaatagtagtgatgacaaaataatgaagggttttagaaatagtaaaactgtactagaaatttcaaaatctagattctgattatttttcacatgaccttaggaaagccactcactatgtacttcctatatttttcacatgagcgaaatcgatctctggttctcagtcttagatacttgtgcagctgaggcctttaagagtatcagaggagatctgagactattttgttgttggtggtggtttttctaattatgcgcatattatacacgcattggaaaataaaaggaaattacagagaaaacaattaataagaaaaagcaatcacttaaaaccctatcttcaataaggaacattattgccattttcaagtgcagccttctaaatgttttgtctatgcacattttcacttacgatcttaagatcatactcaatatgtcaattctatctcagttccatttaggagtattataagtattttaccacattattttaaaaaataaatgtcattttaaattattgtatgacaatccattatttttatgtactatcaaatactatttttaacattttgaaagtctaacagaaaccctaactttatatactagaaaactttcacattaaatccctttgctgtgacctagatatacagaagctcagtgttatatttattgttgaacatgatccagtataatagaaaatgggaaaatgtattcatcaatacaatagcatttgcttattagacacatctttcagaatatagaaaaagaaaacccaacccaatctttagatgatgaggggagtaataaagactttttgtggcaaaataattgacagccactgaaatgaaatatcctcagttctttaaatggaggttatgtagatatacagcagtgcgtctcacttaaaaaaaaaaaatatggtctgcctacgggccttttggacactttttttttttttcctaataagctttctgtccccagcaataatgaaagtttaaactacagatgtgcttagtagacatagagatagaggtatatctctatgtaccatggctctttggaaggccacaaaccattttaccatctaaaattgttttctttcatcccacaagaaccaatgattgcccccgtctagaatgtatgacctagagtaatcattctgggtattattccaaccatgttaggctaattcccatgcaatccaggaatgttctgtttgtcactctgttggaggctgaaagaatgagggtcgtgatcaactcactataccactggaggctatatgagtgaacagcaaactgttctcataaaagcagaatgttgacaaactgacaaactgcatctgctgcccaggaggaatgctgagggcagtcacgacccaggcacaagtgttgcttttgattaggcacatctgaagcctgttaacaataatgtgaacctgtgatcagtcaagcagctgaccaatcgttacctcctcatccctgctctttctacccaataaatacaaagggctatggaagctcagggctgctgcctttgctcacttcttcttcctcagaccctttccttaaaacagtttcttttgttttttgttatcatttctaggttcttcccttagttcagtcttgtaatgatggtctcaggtagtaacagaagtaactgttgtaatgactgtctcaaatagtaacagcagtaactgtgatagtgaaggtctcaagtagtaacagcagtaactgtgatagtgaaggtctcaagtagtaacagcagtaactgtcatggtgaaggtctcaggtagtaacagcagtaactgtgatagtgaaggtctcaggtagtaacagtagtaactctcgtagtgacggtctcaagtagtaacagcagtaactgttgtagtgaaggtctcaagtagtaacagtagtaactctcctaatgacagtctcaagtggtaacagtattatagtaactgtagtattgatggtctcaagtagtagcagtggcggtcggccacatcactctcttcttttatatgctcagaaaaggaaagctgaatcaaaatttactcctaaaccagggcttctcaaatctttctttctcaaagaagagttgacagtgaacaacacaagggctgggacattaggtaaaagaggacaatatttagttttttagtgcaagacattgtttctattttgtctcaaaaatttgtgcaaactttatattttactccttagtgtatctgtattcatttcagtgctttaaaatattaatgaccttatatcttttaagaaaattggtaacccagaagatgtactatttatattctgtggctcacattcttgtacttattttgataccactgcaattactcataagagttcaaaaataccatgaacatggatggtagcactagagcaaacacatgcttttccaaaataactatttttaaggatgatgtatattcaggtacagaaattccacagggttgataaaatttatagttatttcagtgtgctcccaaactgcaatataataatcttaggggaccagaagatagtttcatcttcatttcattgcttccttccactaccctacacattcgaaagtgctaaagtaaatgaggacctggtgtaatccacttttaggtactgtgaaaaagaaaagtggagaaagtgaaggctgcgtctgggctttgggaagagacagaaagagtaatcggttctaagcaatttgctctaatggtcagtgtggaaatgatctcctcctccccactttttaacagcttccactagtagttcaggttgcaccagatcttgctttttaatattctgctagaaggctttctgtagaatcagatactcacaacaaattttgtgttctttgttctttcacacttctctggcattcctgttatagtaattgctggtttatagcatttgagtatagcacttatcattataaatattaattcattgttctttctttttaatggtctcctcagtccatatactgtatattacattaattgttatactacctggttgaaagggataaataatacctctaaacacagatatataaagtagatttggagaatgagaattgtgaaagtaaattgcttagcccaagatcttagcggccaaactgagatttaagattcaattgccagttataccatttattagaggcattcgtcatagtattcatcccacttgtatacacagctgttcttttcaaacatgcctggcattcatgtgcacatctcagtatcctggacagacaaaataacaatattaaaaatctcttagaaaattacccgtagaaaacaagttaattgttttctaagtctaggtacttttgtatcaaagtctaggtacttttctcatctaaaagtgtctcagaacagacatgatttaaatgtatgaattttttggtaattgattaaaggaaagctttcaataatttctaatagttttgaaaatgattaaaagcaaaacataatttattgtccattcctgtatgacataatgaaaataataggaaaataaatggaactacaaaacatactaagaaacgcagtttatcagacgataatagtttgagatgtttaattacagatgcaagaaacagtacagatattagcaagaaccagaaattatatgttcttatatatgggcatactttaatatacattgtctacagctataatattttctaaaactggacattttgttacaaaaaaggaataatttaaaataagactgtcatcatggccggacgtggtggctcacgcctgtaattttagcattttgggaggccaagatggaaggattgcctgaggacaggagttcgagaccagcctggtcaacataatgagacttcatctcatttaaaaaaaaaaaaaaaagaagaagacatcctatttgatgtggaaacaaatgcttttatcctagaggctttgttttatgtatgttatattgatattgctataattgtatataggatgatgtttttacaagttaccttctcctggaaaaatatcatacatcttttgatttagaaaggaaaaatattgaataatacatcagattagcttttattatttacgtttattattattgaaaatatcagcttacagtatctcctgaagccattgggaaagttgctgaggcagcaggagtggggagacaagatgggaacattaagcatgagacgtttggcttttaacctcacatcaccattcacttaactctgtccttgaatttattgtttggcatttgtcagtggtctgagagaaaggtattaaatattgttgtctagatagtcttaaatccataagtgtatttcatgacataaagatgacattttaaaatgtatatatgggccaggtgcggtggctcactcctgtaatcccagcactttgggaggccaaggtgggtggatcacttgaggtcaggagttcaagaccagcctgatcaacatggtgaaaccctgtctccactgggaaaaaaaaaaaaaattagccaggcatggtggtgcacgcctgtaatcccagctacttgggaagctgaggcggtagtagaattgcttgaactcgggaggtggaggttgcagtgagctgagactacgccattgcactccagcctgggcaacaagagtaaaactccatctcatgtatacgtatagtgtgtgtatgtgtgtattttttgtctaggcttttgagataaagtgctatacataaccaggaaatacatgatgaaagtgccctgtcaagttagctagcccatgacctgggaccttttcttttttcttaaggttactctccattcatgggtgccaatgtcattggtttaaattggaggctgtattatcaccaagggactaatctagaacccaattctctactcctaatatttcttctaggtttgctttttcttgagcaaaacttcctacattgcaatctgtataaagtatttgagcaaagcactgagtttccttccgttcagcctgttgactaacagtagagtcaaagcatctactattttgttttttttttctcctagcatcagtaaggcacagattattaacttgaaaaatcagctaggaaaatgctacagagcatctgttttagagcagttctgctgtgacatggatgggactcaggacctgtggggacgttctgccatggctgtttgtgagcttgtgaacaaagtttcctctcatagaaacctcccaagattgttcctctggagaaccatcaaccagagcctgtgctgtagtagagtgtgaactgtattgctaaacaaagtgaaaggcttccctttttagatagttattttaattattttttcctttctctatctctctgaccacatatggcttgaagaataaaatgtggaatagagaaggagatgtgtaaatttctcagtggaactaccaacacactgtaccttaattttctgttgttcaaaatgaggataatactacctatctcacaatagtatggaaaaattgaaaaaaagtttatttgtaaagaaaacaagaaataatatttccataggaaatgagataatgctgttatgttatcttgccttcatttttatttcactgtttaaatagtatctctctttaaaaatctacacagatggttcacaggcaccagccagaccccctaaaccacgaccgcgcaggactgcaccagaaattcaccacagaaaaccccatgggcctgaggcggcattggaaaatgtcgatgcaaaaattgcaaaactcatgggagagggttatgcctttgaagaggtgaagagagccttagagatagcccagaataatgtcgaagttgcccggagcatcctccgagaatttgccttccctcctccagtatccccacgtctaaatctatagcagccagaactgtagacaccaaaatggaaagcaatcgatgtattccaagagtgtggaaataaagagaactgagatggaattcaagagagaagtgtctcctcctcgtgtagcagcttgagaagaggcttgggagtgcagcttctcaaaggagaccgatgcttgctcaggatgtcgacagctgtggcttccttgtttttgctagccatatttttaaatcagggttgaactgacaaaaataatttaaagacgtttacttcccttgaactttgaacctgtgaaatgctttaccttgtttacagtttggcaaagttgcagtttgttcttgtttttagtttagttttgttttggtgttttgatacctgtactgtgttcttcacagaccctttgtagcgtggtcaggtctgctgtaacatttcccaccaactctcttgctgtccacatcaacagctaaatcatttattcatatggatctctaccatccccatgccttgcccaggtccagttccatttctctcattcacaagatgctttgaaggttctgattttcaactgatcaaactaatgcaaaaaaaaaaaagtatgtattcttcactactgagtttcttctttggaaaccatcactattgagagatgggaaaaacctgaatgtataaagcatttatttgtcaataaactgccttttgtaaggggttttcacataacatagaggagcttcccttttttgtttaagttttgtaacctttaatcctccatattctcatgtctgtcatcccaggggtgtcacaactgtaaaaatctacaatattagaaagcagctactacagatgtggaagagagaacacttgtataagacaatgctgtactgaagttatataacaaggtcccctgatacttatgcctgcattactttgagggatgctgaatgagaggaccatctccctgaaatatattaataattttcagataaaattatgaacataacataccttttctcaagtggaattagagttcatttcccatttaagtgattacactctatctcctaagagctgtgggaaccagttcatattgcagtggaaacattaactcttcgttgcactgttgagtgtcaaggctactgtggcaatgttttttgcaaagttctcagtaattttctctctgcaatcaaattagagttcatatttaatttgcagattctctcattcattgctccacactgctttatcaaatcaggtgaaagaaattaatgtagttttgcctattttacaaaatggtggttggttctttaaacaccatgttattactcttaataaatctacaaatatttattgagcatctatgatatgcttggtgctgttaggcactgtgtttttaaagcacaaactctcaaaagctgattccagcgtaatgttttatttttgtttttctgtgttttttatgacaaagtctgtctgatagacaaagcctggaaggtttcccccagggctttagaatttagaattagctggttttcatttcaaatgggaaattaatggagaaatgagataaaatcatctctgtgtaaatgcttgaacccacagaaagttttctaaatatggactaattgtgggtttgtgcatatttctgtgtctcctcttttcacttcacacccaccatgatataaaaagatgcatcagagagtgagcctgccttcaggacctgaaaggacatgactgaacatctagtagatctggtggaaattaatgttatacaaaagacacgtagactaagttgaccctgggagaggagttaatacattcctttgcaaagtgacatgtgccctttttttgacagtctggctttcatggtatgagatgaggactcacaggccttgggtaatttctgcttttgtatgaattttttcagatggttctgagctggttatgtccctggaggggaatttttcatttgccttagatgttcttcccatgagtaggtacatgagtgaagtttcttacacttttaaaattgcattggcaaattttcttttgctttatgaacccctgttttgtcattatgatttttcacttgttttaacagtttcagatgtcaccttggaatagcactgtttattttggcctttttatgattgctgatgataggtacagtctaaaggccaaaagttgccacttcattgtgataacattgttgcaacattcctaatatattagagaatgatgtaaaataagaatgttagagaacatagcacattctcattcagtttataaacaatatttgaaaatttccagtgagaattaaaaaaggactagtgatgatatagcaaacctggacctgaaatttgggggtggggggtggggggatatctgttttgcagagaaaatttaccagcctccagcaaaatctctgcatcttgtactcaatagcaaccattagtattgtcatttaaaaagaatgaatcaaaaattcatacgtaatggaatgaaaagaggaaaactttctattaaacactgtcaagaaagacccattgctatctatcacctatgaaattaaacctaaaaaaatttttttttattgtaaaagcgactgctcgttgatgtctggaagtgatccagactttgtttcactgtgatccaaaaagttagacattccttccatttctcaagatttggtaacaatttttttttaagtcagcatttcatataatacataaaattaagacaaattaacttactgatatgtggccaatatcaacccttctcacccaacccaaacatgttctggagatagaaggacttatcctcaattatattccagtaaatttatctccataatctgttttatcccctaatgtatgatatatctcaccaaatttttctagaattgaataaaagcagtttttgcttaacttgaatttccttccacaaatacaaccttcagctcttccctctctgtttcccttttgcccacattgcaaatagtcttcataatagaaccctcactgcaacttaaaagggtcccatttcttaactcagcatttcatataccaagaacacttgcaaagatttcttcataatgtgattttttaatttttcagttccagaagcatttcctacagttcgaacgttattttttctctcagattttcaacttgaagctttgatttgcactgaattaacttggataaaattttagtttctctcttcagctaacagatttggaagcaaattacagtatacttgaataattcaggtactacctgttgacctggaattttagtgattctgggaaagttttccagacaaagacaccaatagagtgaagggttttttccccaattactattttattgttttttaaaatgcctttttaaaacttgtgtgatgtggcaaaatagtcatatgttcaattaatttatattttattcattccttttcaattctggttattatgtaacctcaagtactttatctgttcttttaaagtattttataaaatgaacgttaactaaa

SEQ ID NO: 824 - DNA, 176818 bp, Mus musculus
cttagactcccgctcggggcgctcacgcccacctgcgcacccctcattggttagctccccggcgccttgctgctactttttcagttcctttcctcgttccacttttgttccaggctagcctaggtccatttcccaacgagttcttctccaagtgggacgcagtggagtgggccttcctctggggccattgtgtaccgtggaggacgtggactggggggtagcgcgggaggagcgtctcgtcccgcccattggctccgcccgctgtctggcagaaagcagcctctcaggattggttcgaagactcaaggctccgccttagctccgccccacgccttggtctccggggatggctcaggggtggggtggccagtgagtggtctcctcctccggcgggcgctgcggcggcctcccgagtgtggcgcgggactgccgggcgggcgtggagctttttgcacggtaattgccgcgtccccgcgtctcggtgttcctagatctcggtggctccttccccggagcgctctcctagggcgattccacagagtccccacccgagccaccccagccagggcagcgtgtgtgtgtggagtgggacccgcgatcacgcgtggctcgggacggccgcggtgacccgagtagaggaaggaatgggtcatcccggggttggacgtctcttgctggctcgggggccctgcagctgggcgcgggccatcagggagaggggacagccctagcttccagctgctgtcgccgctgcgggcctgagccaagtggggatttaaacagcagtccctggctggcccggggcccgggagggagcggactctggctgatcgccgccggtgggaggtgcgtgctactggcgctagatcgggcaggctgtgggattgggaagccaggacggggtctagggctactttatctttgctgagttcctcgtctctttcccagacccctgagtggcgggctagaggcccgagcctggaaagggtacagacgttctgaaacaaagctttggaccacttgataccgggtaggcagaagagggaccaccggagaagtgaactccgcggtgcgtgcccgcccttgccgggttctcaccgctttttaagaaggggttgcttgttggtttgtttatttggctctagggaaaaactactcacctcactgctttaaagaactatttgtgtgtccgcagctgctggcttttgcggggggggggggtgttgggggaatggagaggggacgcgcgcgcgcggggcgcgcggggggggtatccaagtcctccgcctttgttgacaagagacgtgtcccttttgcgtgtgtggagtactttgcatttatgtaataacttggcgaaatcaaacagcgtgaaggaggctactgaagtgaggctcccaacgtgaattttaggagttgcagctctagtatttcgaatctggattacagcagaaggggggggggggacgacattgtgttcttacctgttaaaagttgttttgttgatgatgttgagctgtagcttcatagaacacgggcagaggatgcatctttaacttttagtattgtaagagcaaatcttgtgtcatggctcctaacttggaggatgcccttactcagggttactaaaaagttgaatctgggaccctgggctttgtcacagagacagcggagaatatcattaatgggtacaagtgagcctgttcagttcaggttcctgttggggaaatactttcatatccagctaacttttcctctcttgaaattctatcttgcaaaaaggactaagattccagatggcaaattctatgaatggcagaaatcctggtggtcgaggaggaaacccccgcaaaggtcgcattttggggattattgatgctattcaggatgcagtcggacccccaaagcaagctgcagctgaccgcaggactgtggagaagacttggaaactcatggacaaagtggtgagttcagtcagtgtgtgtacacggccctcagcaccctgaatgcgatttcttcgggttttatttatatgtatggctaataatcactattatggtgatgagctttgtatttaggttgggccatttttcttcaactctgtgtttgcaaaagttgaattcagaggaaagacttttatttttttattactctttctaacttattatcttgcttttcaagttccagagcccctgggtattactccaatatgcagtttataccattggctacttttgctgggtgtatagtatggtttggaagtttgcttagtcttatgtggagttgccttgctactagataatataaggctaacaagtgaacaataggctctgctggagcacacttaggacaagcacatgggtgatgttgaaacctttactggggaaagaaccagaactccagggaggattcagtattgaagagtttgatttttatccctgtaaactcatctttattaagaaaatatatacatatatacatatatatgtatacatatatatgtatgtatatatatatatatatatatatatagtctttactgttcaggacatcggtacagtttctttcatctatgattccattttgaaacagggaacctttttggttgtgcgttgtttattgtgaaaggaaaatgtatgctggaggctgtgtggggctgagagtgtcagaaacttctgtggtttttttttttttttttttttttttgttgcttttagatgagctctagtttcacaggaagaaaccaaactggatggcagttctcagtccagttataagggcagtgtgcatacctcccagggccctgctggaaaagctagctgtctgaggaggcttgggacacagatgtgttggtgtccttctcggcacacattcataactttatgatgttgagaagaagttgggctatgctttgctgagtttgagacattgacaaagatgctccttttgaatgatgaacaaaggcgtgttgacatcatttggtgtcatttaccttggctttggtttgctaccaaagacaaaattggctacaaagaagccactgagaagaagtaacaattctgggaggtgacactatgggctttattttcatgtattcttatggagattgtaggtaagataactaaaccatggccctgccattggatggccactgatatcaaacgcagcgccagagcattttttttaaccaggtaaatagccttagtatggggcttcagtgtgacctatttaagcttctgccaatgttttcacattgttatgttgaagtgctccagacggaatgacgtcatgatgtcagaacattgcaacttgctgcttgggctcaggttttggatttagctttggacacttcggactgaagaattgtgcagctggaaaaactgcatgcatctggcaagcacatgagctgtcttttgcttttctactgagtcttcttctgaaggtcacccttactgcctgagtcattaattggtggtaggagaagaaattcaaggtttgttccagtttatctgttgcataagtaggcaacagatgggtgccatttcaaaagggagttggtccatcagcatcgtttcttgagatgtttagtatttgtatatttgcgattgagctctagagcataaaaaagatttatatggtggcgtggtgagcaacagttactgtcaagtggtcagtgaaatagtaaaaatgaagtggtatgcataattttgctgcataactggttgttaaccagtacattaatcgcttctaattatttcaccatgaattacagtaaatgcctggttatttgacagttaaacacctggcattgtccattaacccttctgtgggttttaacttggcttctacagctgagtttgacccacaaggaactgttttaccccaagtctctacttagtgggatgtgggtgccagtgttggcaaagggacaacaatatggctttccctagtcatcttcattatttgtcatagatgacaatgtgcatacctctgtggctttgtggaggaaactcccatcatttgtcaatagagtttggtctacttatttctactcttcacacgcactaagagtaaggcactggaaatgactattaccaattggcagcatattatttgaagttgggatgtagatgtcttccccagcatgggttcatctccttctgtttgacagtgatgaaggaagtggatcataatagcaacactatctggtgattcttcaggaaatttattactagtacagaaatatgaccatctgctgtatgacctagagaagcagcagtgtgagtttactttgtgaatacagaacagaaggtttcacgtctgataggttgttaaagaaaagtcaggcttaagagtgaagttgcaccgttttctttatggaacctctttccctggggaggtcttcaaagcattgctttcacgtaattactaagcaccataactcattttaaagggggcagagaatcagtcttgggcagcacaggatatatcttagaagtgtataattttatcattccttgacctctagaacttaagaaactcaactgaaaagtcagttgcaactaagtgttctgttttcccagggcagccactctttccaaggtcacccagcataggagaaaacagttgttccttgtgttctttgtaagttgtgtaacgtttttgtaatcggtagtgcagagttcacagtagtgcatgccctgagaaaataacaaatggtgggatcccaaaagcataccccttagatagttttctggtcttagttcttctgatgagtctaagagactgactctaaagccataacgtcagtggatggctcattgataacactgacagaactattctagaataatacacatttaggtttaaatacatacaaaatcgtttgtagattttgttcctaagttgctacaggcatgtttccatcaacccttaaacacttattgagggtttgttgtgtgtcactgagtgactattactgggggtgagtgggcagactaggtaagccataacctatttttggcctgtaaaccaggaggacaggattagagctggacaagagttgtaattgccatggggtgtgaaaagggctggggtaaaaacctaaaaaaaaaggtaccttggtgtcaggatagaggatgcttgcttccctctggatttcagtctggtttctgctgccccagccttttaggaacaacattattctgctcctgttagaaatgctgaagcgaggggaaggaaatggttgctcatcggtgtggttggagtcatcatttattaatgtgaggttcctgagtgtggtttgcacagagtctgagccaggtgatggaaaacagaagaaagcattttcctcctaatagatgctaaatgcacagagtgtacatggatgctcgggaaattaggaaataattacttgatgataaagagccaagcaagctgagtacctgctccttgtcttgctccacttgccgtttatttgaagttgagttggtgcaccagtgttagatgctcttagaaagagatgctgtcactcggcgtttgcttgcctttcacctattgtataccgcttagccttaaagtaactttgtgcgtaatctcaccagaattaaatttaatgtctgtcaaagatgcatgagttatgtacttatacatatttttaaaataatagtaccgtaataatactttttgcaaggtgagttcttcagtacatctgagaaagagtctacaagatttaaaatatagttccctgaccagctcctgacagcggagcagctgtgctacccaccacggggctacatccccagggtatttctgactttttaaaaatttagctctatttcctttttctttgcaaacaagatctctaaattgcccaagaactctctcttgtagcctagcttgtaggctttgaacttatgaccctcgtcagactccatagtagactccatgatatacagtcctatatcatcagacatgaaagttttggatgctaattctgtctgtcagctttccagagcattaataaagggaacaccattgatttgccttatgcatggatttccttttctttcttcaagtccttcattagacggatcctgggccccattaaaccttgattgagtttaataacacactagctgttggggcaattttgcttatcactgaattacattttgaatttgtgctgacaccattggcttgattctaaagtttgcgactagtgacacctggaaaagctttatttgccatagtaaaagtttgaaagtagatctgtgaagagttaacttggcctatccctgtaatagaaagcaggcatataatggaaaccttaattgtgactgatttgttaactcttaaaaatattttagccgggcgtggtggtgcacgcctttaatcctagcacttgggaggcaaaggcaggtggatttctgagttcaaggccagcctggtctacagagtgagttccaggacagccagggctacacagagaaaccctgtcttgagaaacaaaacagacaaacaaacaaaaacaaaaaagaacatttagattttcctttcttttaaaagtttcttatatgctgtcaatttctttatcttcccctcccccacacccccaaattctagccctggacagacatcgtttataaataatatcatacagtatattaaataagcactataacatgatgcaaatactgttcctagtaggtggaggtgactgttgcttgctggaggtgagaagctggtgaaaggtgctgtctgtgttctaaaagattgtttgaactcgaggggctggaaaacatctttcaccgaaggaatgaagagaggctgttgtgtgagagtaaagtagaagaggatggtagaagtttcaatattaccaaagaatttggatccagttagtttggtaaacatataaagttttctgaggggggggggagagagagagagagagagagagagagagagagagagagagagagagagagagagagagagatcaaggccagtctttcatgtgctactctgcagagtctgaaggttggcgcaatgcaaggaagactagggatgggatcaggaggagtcacagcaatgtggttaagaatttataaagacctggtcctggtctagagacttgacagtgggttgggtttagcaagtgtgtcacagatgtggaaggttatggggggaaaatctgcagtccccgagcatcttgagggttcccgaaagaaagagaagacgaagtgaaagtggcttgaggttttcaagctagtcaactgtgaaggcagtggagcccttaaggagatggggcccaggaagggaaaggccaaacttgatggttggcatgtctgtctgttgtgtgttgagtatgacctatgagagagaaattgattttgaagtcagaaaattgggtatacagttccgagagaatttgaaaccaggatcatatgtttgtcagttgtgtttctaggccgagcatctcaagctgtagcactgcgaaggagttaggatgcagatctagactcagagacaaaggcagaacacccgtcatggggagcaggagggatatttctttagagttggtaaagagatgggaattaggacatagaatagcaatggaaaggtgaagaaagagcagttgtgtattaatctctacatctaaacatagagaagaggattccttcaacttcttacaaagctacatttaagaagagaaactaaacagggtaaaacttaggaagtcattggatttcctaatcagaggctattgttgactttggcacattgatttcacttgtgatgaggccagggtaggatgtgcgtggagattatttagtggttctacaactgtaacaacagacacagagcaagctgtggtagcttgagggtttattgagggttgaacttattaattttatcgtgtgtctctgtgtctgtccatctatgcatgaacaaggcttccattgtaccagcagaaggaatacatgaaggtgtagattacagtgaggatggagaaagctctatggaagcaactaggagtggctaagtgaggcagacaggtatagtttccacataggcaggagggaaatgagacacacgtaggggcgttttaagtgaatatatacatctcttttgggttggtaagaagtagtgtaagatggtatttgtagtgtttaagccttatctttaaagttgtacattatagaccagtcttccaacagtggagtgggtgagttatatgaattgaagtggccttctggctcctccctttacattaagcatcatcttacgcacatgctgtgatgacaatggttgctgtgccatcttctttgctcctatttatggcttgtttttttttttaaactatttgttggatgccagtttttttttttaaatcaatgaaagaaactttagatattggaccaacatgtacagcttagcatttcacatttgagtagttgttaaactgaatcaaacttgcacacatcagcagttaagttagtactagttcaaagataaaatttccctccgtctttagttcttttcttgagagtctcttaggtttgaagaaactagaagatggccatgtaaactgactaaaataggggcctgccttgggtcttaccccatatagaacacccagactctttatagtggcctgcctttggtctcacccctgtatagaacaccccagactctttacagatttcatgtagcataaaaagttttcaccaacaggaagagcccttaaactatcttgatgttgagtgggctacctagtgcctttatgaccttgtgtttttataaaatctccatgggcttttctttgctgtgatggaatataatgtatgaagggagaagaacaagaaggaaatgagggatggattttcactgcatgttgtgctgagaactgcacttcttatttctctttaaaagtctgtaaatcagtgagacttctagaaggaagcagccagtttggattgtacttaatgtgtgtcccttgtattaggacagtgctgcacactgttgcagggtgttctctttcttacaggaagtaaatcacaagggtgtttattatttacattttgcactaccaaactcttctccaaattttgtattcagttttggagagatttattcaataattttatggttatcttttctctctctctctctctctctatatatatatatatatatttttttttttcctgcaatgtcttaactcttttccttgtagccttctctccatcaaacacatgctgtacttctttttatacaaagtgagaaagatagaccagtgaaaaaaaccagatatgttctccagtagaacagaatacacaatgtgtattttaagtataagcagttgtttcgtaagtggtcctttaaatattaactccctaaaggtaatgtcattgtaaaacgtaacagaattaaacttctcaagattccactataaccagtcttaagctcttggccagttttatatgctaactttattttgcttagctaatgttctgtaaaaactgctgtattattttgtactcactatgtaatagtatgtcttcttttatgtatactttattcttttcctaggaagctgttgagttcaggtagaaagaacatacagacattgagatgctttttagacccgtggctttggtgtagccgagtaagaagcctctgaggtttccagaagaagggctctcacactcttgtctttagaatcagggaccctattggcgtgctcctccctggggaggactacttctcctgctcccagctttagtcacttgtatgcagttctttgtgtagaattgaggcctctgctttggcgtgaacattggtgtcctccctgctcaactcatttttggctggtcatgttagtgagactctacagggacagcttctcgtgttactaggagacacaagtgcccaaccaagtcccgggttctctgactctcacagtgtttctgcccttgattgtgcattgtttcctaagtcctaggtatgggaatgttttagggatgtaaccactaggacttgtccagtgacaaatgctcagccaaccctgaaaacatacatccatgtacaatgtatggacttgacaggttatatatatgaatatgtatgtacatgcagatacatatgtgcgtataacaacaactgatgaaaatagaagttaggagtttgaagaagagagggagggttatatgggagggtttggagggagtaaagagaagagagaaatgtaataaaatctgagagagggggggttcttgggtcttagctcagtggtggtagaatattagggtcctatctccagcacacacatataaacataaaatacgtacttggcttggagactaagtgactcaatatgcttccagtatccatgagtgttccttgggatgaagtacgttttggaatgaaagttatttacagtatagtcacagttgcttaccattgacatgtttttggtttgtaaaacttcttttgtacatttaggaactgatttccactttattttcgaggtgtgctaggtgatctgaaactctttatttaccttttggctggacattttccttaagacacagctaaaaatctttttttcttctttttatttttataatttttattataaagtttttaaatttaatgaaaattttttttacttatttacttcagaaatctttaaatgtaacattccaaagtaattaatggcttgaaaaaatcttatagcaatattaaattctgtttttatgtttgtgccttggctttgataatgttgaaaaatgtctaattatatggtcacatacatctgtttttattaaaatacataaagtatatatatatataaaacaataatgttatgtatttgaatcaacataaactatatgaacatagagtatgcattgacatctttgaatataactaaatcctagtgtctgttctgtagtgtagtctctgatccctaagttagtcatctgggtactgagaagttagtcctaaacagggtgcatttccgtgttttaatgctagcatgccacaacaagaaaagttcttttagtgattctaaaggtttgtaaagacttcagtctcaaaatccttgggccagatgatgggatattcagcttaattccaaacctgaatttcttttttgattaaaaagaaaagagtcatcatgttaaccaattcttttagttatcagtgccagccttaaaatgcccttcattgaataacatagtgaggtttatttctttgtgaaagctcctttgttttcccaccagctttcattgtagggtgcagctcagatagttctagaacttactcttgtggtaagcttcatttttccccttaatacactggttttagaagggctatttttctttctctggctttgccgttccgtgcacatagcaagcactcaataaatatttattgaatggaattgaatttgacctgcttagaagtcatagtcctggggtaggattattcattttcggcaggagcggctataaatcacagagtttagcagtaatccatctgatgaagtgcacacccgaaggcacagagtggtagctcagctccctcaatcctgcctcctcccgtggaaagtttgagcacggggtagctttcagagtcctggtgcgctaaggtacactactccttccaacctccttcgggtcttctgaactgtgtgctgacagccttcctgtgtgcccatcctctagcacaactgcatgatcccgttcctttaccctggtgtctcacaagcctttgtattatgatttagctgcaatatttaggcgtgcgtttcttgatgctcttgggaatgtgacttagccacggcctttctcccccagagctttgcaaggtcctttgtcacacttctaggttctgtgatcctttcttacgcccccagactttcccaccatactgctgcatgaggacaggtctgtgagtgactcctttgtcttccttctgcctgagacaatgcctgttatgtacacgttcttcccttgaactaacaaatgggccatgaagttcatgtaaattcgcaaatggaataaaataaaaatggaaatgagtttagaagggaatcattaattatatgcctaattctaattaaattgtaatatagccagaagaggaacccgagattcagaagatgcaggctcttgtgttggattaatgtttttttaactgtcccttaatctttgtagttcttagcttttttaatccggaaatgaatggattggatgagatcttttctaagatcccttcaagcaagaattacattgctcctaagttaattatatagaacgaggtctcctttgccagactccttgaggcagggagcgtgttgtactcatccgtaatttcctggcacgtagctcagtacctggtggatgggagttattcagagagtttttgtcctttaatcaagcaatgtgtttccatgtgaaattataattggaaaaaaaaagcaagtgactaaaatgtcatataaggaatagtgaattagatatgatatgtatgacactgaaaagtatctaccaaagaacaattacttgtcatgtctaacacgtttgtgatgtttttcattaagtagttaacaaattaaccaatggaacaaatgaatgtgaggctgccctttttacaagttaataattgatcagtctgtgacgttttacaaggacatgttgctaaaattcagcggtgtccaccgtgagaggttggtggagttcttgaaattcacctgtgctctggttgctcttggctttaagaattgaaatactggagcgggtaagatgactcagtgataaaagacacttgtagccaagcctgtgacctaaattttatcccttaacccacatggtgggaagagagaagcgacttaatcaaggtttcctctgacttccactcagatgccaacacacacacacacacacacacacacacatacatacacacacacacacacacacacacacacacacacacacacacacacacacagatcctctttgtcatatatctcagctctgtaagcccttttactctacaaagacttggtattacttaataagggagattccatctgacctttgccaaaaaaaaaaaacccaaaaaaaacaaaaaaaaatctcttgaggattaaggtagtattcttatatttaaattaaacccttacccctcatttgttaattatatacctatagaactcaattatgaaaattaagcaaattatatagtcaaaccatttataaaaagtgtgtgtgtgtgtgtgcgtgtgcgcacgtgtgcccgtgtgtgtggtgtttctttcatttaaggctaggctcacaatttaaaagacaagtgtgtgtgtgcatgtttatacactgatttttttcagtcaactaaacctgtttattacctgcttatttattagttgagtatcgtgtgctaagatcctggccttaggaactgtgtacacagtgggagaaaatagggaaaataggggcatgcaacaggtcattgtgagaattgatttcgttcatggtcaatgcctggcctgacaatttaggccagagtggtttgcttgtttgtttgtttgtttttataaaaaatatacctatgcaaatgtgatagtctgagggctgtttatttcattgctgacaaatttactttgcgttcctgctttctaaagtgattatagtttacctattttgagtttgtgataatacttttatggggtctagaggcaggtgttgaaacctgaaactattgtcatttggagggtccctactaaagtactatataagtctgattatgaaagagaattttctttagtgttaagcaaacaacaaaccccagcaaattaagcttttgaaaagctcccaagactgcacatgttgataaacatgtctgcactgctatctgacaagctgcctcttgcttgcatactcctctgttgcctacatgcgcttcctgccctggcttccttgatcctatttagatagcatattgaaatagaccttctcacgcccgaagcaggacagtcagtgcttatgatatttgcgtgtttgtgtgtacctgaagccttgtgtgtgtgtgtgtgtgtgtgtgtgtgtatatatatatatatacatatatatatatgtatatatatatatatatacacatatatatatatatatacatgtacatattatatgtttcagtaaaagttgtgtatctgtaagatttattgcaatatgatgtacctctgtagagaaagagggagtaaacatgtctgccttgttttgtagtaagagtggctatagtctttttccctagagacttcaatttgcaaggtgacactgtgaactgtggttctctgtgctttgtgtttggcatctagacttgtgcatcccctttgacctctatcccccactttcccttctcctccctgcccttgagagccatcattcgattttgtttctacgtgttttacgtcttcacttttagagtctgtatataaataagatcacatagcatctctctctctctctctccctccctccctccctccttccttccctccctccctctccctctctctctccctctctcgcttatttcagactgccgaccataatttctctatttatggaactgactgcatgctttgcatataaattctctaaacccatactgaatgtctctctaacttggcctcctgttagccaggttccagaaatgtcctttggccactccgttgccacccaaaaggaggttcattgtgatgggaaggaagatgcaggatcatttatttatagtgtttaaaattgtatgctctgagatcttttataaaaaccaaacatgcacaaaacctagaggaaaacacatcagaaggacccaggggccttacgctgtgctgacatgatagaagctcctgccggtggacattgcgcctgtcatgagtgctggactcctaccttatgaatgcaccatgcagttcccaaagctctttttaaaatgattgaattggtgggttcccaaaaccctagtcacaaggatgaaatgaactggtttttattaatggctaagttacctttaccttaacgtgtaaaggtgaatgccgtgtagttttaaattaccacttctttcttctcttcttcttcttcttcttcttcttcttcttcttcttcttcttcttcttcttcttcttcttcttcttcttcttcttcttcctcctcctcctcctcctcctcctcctcctcctcctcctcctcctcctcctcctcctcctcctcctcctcctcctcctcctcctcctccttattttcttcttcttctttcttattttttcctggaggaaagtattttcagttctgcaggcagcccttcctctttaatgcgcactgaatgcatggcacctggtggagtggctgaacggtgcatgtttcataggtcacgtgtttctaggcctattagacactaggaagagagacaggcttctttagacttgacacctgtttaactgcttagtaactcagttgtgaaggttcagaaatagtgcattcaaatattaaagtctgtgaaaaagctttagccatgaacttaatacagaaaagtagcgtcttaaaattagatattcattgattgcttgctttcatataaaaccatattggtgttaccaggccattagtaactactacactgtgttctattagactgtacactctaggacactatggaaaaggtaatcaaaatgattagaggtgaaaatgaggatggaatatagcaaagtttgcctggaataagaaaacgggatttgggtgttgtaagagaaaagtatttatagatactttctaagcagattcaataattcagatcacagattgtattatggaaaggaaagaggacatagctctgttcatttataactttcctatgacagaaaatagtatagtatccataaagtaattttttctttgtttttaggtaagactgtgccaaaatcccaagcttcagttgaaaaacagcccaccgtatatacttgatattttacctgatacgtatcagcacttgagacttatattgagtaaatatgatgacaaccagaagctggctcaactgagcgagaatgagtactttaaaatctacatcgatagtctcatgaagaagtcgaagcgagcgatccggctctttaaagaaggcaaggaaaggatgtacgaagagcagtcgcaggacaggtgagcacgtgggatttgtactgttccttgtgtcacgttcttcccattgttttgtgtctcaaggttaacagaagtgcccttcatgtgttctggggactatgcagtttccttgcctgtttccttttcctattatttaagtttggcaaaagttgaggtagaatgtcgaacctgagccaatggtcttgctattctctggactcctttttagagcacttcatgtttcacagaaagactgcccacggtagttcctgctgcttcctgccaagcaagccgtcttccccagcttacatcttttatatggattttcataaagacatgagaataagcaggtcttctccctagataagccactgacagaacaaagaaacaaagattccatcctggtccagcttggtaaaacagcctgatttggggttacatagcgaggttgggtgactgtgctcatgagaagtgtcactgcagagtaccaccctagcatggatgatggctctgaagttgtgttcttagaatcatatcttcaactacccttcctcttcctatatgactcctcacctctcgtcaaataccaagagccttgggtctcagaggcaatggcagctggactatcagatgctccatttccgtggaggtagctatcacagtatgcttttgtctattttcttgtcatctgtgtggggtcaacgtatcctgtagatgatcgtagcagtatcagttccgggatggatatgtcatgctcagcattgagaatggagcttcactgctgggccatctttgctttagtgtggcatacactaccattagcatagggttcactgtttttattgttctgtggtttacaaacatacacttgtcccatgtctacccataccctgtaaaaactccctgtgttaggctgggtaagtggctcagttgttaaaggctatatatagcacactattaaaatgacaagaaatgttctaccttcaacctacacagtgtgcagtaagtaactgttcagactggtttcttgctggtctttttatagcttgacagcctcctttcttatttcatggatgatgacattgtatgtttgtactacagtttgtttctatactcactcttgtgttgaagggtaccttgatggcttcaaacgtttggcaactgtgttggagctggtaggaacattcaagtcatctggggaaatccttggcgcatggtcattagatcttacgacttgcctgtgtgaattctatcctgacatagtgactgtgttgttttccattcccaccagtaatgagtgagatttcttgatgcttatttgcttcagcatctggtgtgagagatgcagtacattagattcccttcgaatctcttagtgaagtagccgggagtagatgctctttcagcatacatattttgaccattaagtgagaaactggccaggaaagactgatatgaaattaagttttagtccttactttatagtcaggaaatgttctcgttctctgtctccattcttgtctttctctctctgtctctgctctacccctttcacccaccctacaagttctcgtgtagcccaggatggcctcaacttcctttttaaaattttctttttgaaatgtttatttgacatgggtggctgttttgcctgcccatctgtgtgaggctatcagatcttctggaatgtgtgctgggaattggatctgggtcatctggaagagcagccagtgctcttaactgtagagccatctctctagcctggcctcagactttctagatcctcgtggcttgccttgaactcttgatgctcctgagtctccccgctgatgctactggaatatcactctgactctatgtggctcccagtccttgtgagctctaagggcatgaattcaagcaccacacagtgcagtgtagaagagactgggtttactacagagaaaagtagggcactctccagggatgagtgtggtcggtagctgaagtgatcactatgccaacctccattcttagataggctttatctagttctcaaccgtttctagagcagatgccttttctgaggggggatttccccttcagatgattgataggcccacttaagggtctaggcaatcccgcgccccttctttacaagaacattccctaactagatagaagtcagtaaggtctgggtggctgtttagaatgctgggtttccacttgaatccagagataggatcacattccttcgaccagttaagtcctccaactgcagttcctgtttgtcaagattgtgagataggggtctctcctcactaaccttcagacctgccagtgtatacatatttacttaaaccaggatgttgagcttctgaagcaggatgctctatctaggtaagggtgcgttgatggctggcgtctggctctttagggtttggattgaaatagctgtctccagcttgataatggaactgatagctttcaccttttctgagctcctttcaatttagctagaatattaaccaatcaaagaagtatttccagctggaaagctagtatgaattaagatacgtaatgtcttagcgttagctgaattaatttaccactcagtatttaagttaggaaaatctctaagagacatataatctttcatatcagaacacataacctccttggtttgagatggtttagggttgtgtaatggaaaatttagttatctagttacataggctctgaaattgtttgtaagagctggccaaataaatatacagagcgtgcaaaaccatcacattcacgcaccgcaaaggcctctgccagaggtaaaatgacataaatgttgatctcaaatgctttccagctcattctcagtcctagtgtacccgtggagtacagcggttctgtgactctgcgtcctccacttaacgttcttggaagacagtttatatttcttgagggcagtgaacgtcctggctgcctttcaattgtaaagctcaaagcctccccagggcttcagactcagtgagagtttgaatggccacatgattctagcagcaaggtagatggagagagaccatggcgtggggtgaggttgttcttcgggctttacgtgatggaccaagttgttgaaatccagatggtgatgtaaactttttcaaatagtatttgtaccacttacaaaaacaccaaaccaaaacaaaaccaaaacccaaaaaactaaattgcttttacaaacatcactgtaattcctatttagatatagcctcgaagttcttggtattcctgctaagcactttatgatatcaggatgccagcaaagtgtgtaactctcaggtcaagcacttggagcagaaggcgtgttttagctggatgtaagattcaggtgataaactcacatctgacttttacgtgttccaaagaaacctgaagcatgttccaattcagcagacattttataattatcactacagcaactgtcttgcatttacacctgtgtcaaaaaaaaaagaaatcacaggacacatataaaattttgttaagggtgtagagttccacagacagtggtaggtcacataagactggccataaattgcatctgtgcccctggtttaagtatccaggtaaatttaagtattccgaagtcttaaacatcaactgtaagaggaaatacagtagtttgtattctgggatagcatattcccttattgaattttactatcgtctgtggtctctgtttttttgtttttttatggtctatagccaacctttgaaagtacacattcttctgtgctaaataattttctagtgatgatttatagtgaaccattggcatatgacacagacttctgatctgtgtctctctggcagtcatccacttgtgcacattccctgtggagcgtccttgggagtcacaaaactgacgtgaggtacattctcgcccgtggagccctgtggcattttgctttgtagaaccttacgggaaattctaagactgtccgtgaggaagttcagctactgaatatactgttcaggaaaatggccactgatgtgtcaggcgcacaggttattgggaatcttagacatcctttggactgtcctctctgattccgaaccgactcactggtcacagtaatgttgttcagttgacactgaggaacagcagtagaaatagtcattttgaattaaaaagagctcacaccagcactgcttcaagtgagcctctattggataaagttgtgttggatgagtgcctgtgtcgagatgatcaatgtctatgtatctgctgtgtcaatcagtgatggacttctttctggctttattttaaaattaaatgtagatacataaattaaaaagcaaacattgggtcatcagttctggaatgtggagctgtcttagttgactgaattgttcatttcatgctaatgtgatgtaagcatgtaaaacatgtacaacaaaccaatgtagaataagcagacagctttcagtgtatttctttgttagtactatggaaggagtgaggtagggcttttagctaggtaaagtgccagtgctgcccaaagagacatctaaggcaccaggaaactttgttgcactgagaatggcagggtaatggtttctgactcaggaaaggcccatggggttgggggactgcacttgattggtccagccacgctcctttgtctctcttctcacatgttagggaagcaattgaacctcacctggcttgagttgatgtgtcttcagttgggtgtttaacctgttctgaacatgtgtttttgggaagagatatgtagtgaagtgtgacctaagagttcctgtcagtgtgcttggggggtgtagcagtaacttgtagagaggtctacttggggcatgggaaaaggagactggctccagttggtttggggaatgcaagagacataagggttagtcctggggaccacggctatatccctttcttctgtgagtttactggtactttcttcagtcgtttgttttcatagtgaatttatcttccaccagtaaagtgagcatcagtgagctgctgcctaaagcctggtgtcggacagccatgtagggatagtccaggatcatggtttcaggagttatgcctgcaagccgggtctataatcccttccctcccaggagcttcactcctgaaacaagacctaaagttaatttacaggaggtagactaactgcattaggaaagctgtctgtggagaaaataaaggctttaaaagtgcacacagagacaacatagatgttgtcttactaatatcatttttgggttctctttcagtttttttgtacaccagtgtagaagaagacaaatccattcccagagaaaatggagcaagtgctcgtataggaggggcagtattctgttctttcgcatagtaatgctcgcacttattaaggtttaatgggagggtatttccgcatagagaagctaatcctttgagaggccagcctatatttgaactgcagaaacatcaggcagattttcccattgtctactgactaagctgagctaaggaaaacctgttatctgctatgttaatgagctgtccttcccctggaggacctgttaccactgcgtctcctgctaaccccagtctgggctagccagaatattttccagttgatttttttagagacatagttaagcaaaaaaaaaaaaaaaaaaagacttggaataaaaatgacaacagaaaaaacaaagcaaccccttcatcccccgcccccaacaataattacaacaataaagagtatctgtaacaaacaatgctacaaaaaaaaagagcctccttcctttacgtacactatgccttcactgtttaagtaatgtggtgtgtattacggtgtttaaatttaggtcaggcgtggtgtccacacctataattgtagcactgcgttgacttgaggcgaggaagtaaatttactggtatctaatgctgcctgttctatacatatctatttattaaataaatatctattatttaacagtacatgaaagggaatagttttatttatttaaatagactatattttctactttctaatagtggaaaattatagcctttttaaattcacaaggaacagagatataaattacaagcaaaaaaaagtggtttctaagtaaaatagacgacaattgttttgagcagcagtgttttaatatagtcactgactatttaaattttgtatacttctctgtattctaggtattttgtctttttaaatactaaacgagataattaaaacattactatttctatgtagaaatatgtctgcccactaggatatggaattttattttttaagaaacttaattcctagggttgattcactgtaaatgagtgaagtaaaatttttatttgttcccaataagaatattttcatgcatctgagaaattatgaatagcctgtaacccttggaaatgaaagggataatttctttaatgcatcattaacatagaggtcacaagaaagttatttggacaaatgttttcagagttaaacaaagaaagactgttagggtgggcaagcacctggagacccttgacaaagactttatggcccagtaggtttggctaactgcacctctgttgctttgtttgctagatacaaagtagttttttgtttttgtttttttgtttttttgttttttttagttgatagttgacttgtagcaagttcttcattggtgtccctttttcaaaatttaaaagaaatcaaaattattcatatgtaatttggaactattccgcttaaaacactttagtgaaatatttgcctgtaacccaggtatctgttacttagttgtttcatttgatttcaactccaccctactgtcctttagcctttaactcctggttccatgtatatagtatttttattttattttagtctttagtatctttcaagtaaagatgacattttatgtccataccttatctggattttaaaattggggcattgctcctggtgattccagcttgttaatggttatcaattccggagataaccattatgcgacaaagctgtaaacaaatgcacaagactccagtggacttggcttacggttgagtaccttttatgtttttcaggtttaaggcagcttattgaaattgatgttttcctgcctgtaaatatctggtgatgctcagatttgataattacaatccagaagcacttaagaaagaaaggttgtttttagtttcgtaataacaacactcccgcaaagaagattgatgaatgatgtctttcaagtggcagatttgttatttagttagagaaagctcctctgccagttcctcacaaagctaatttagagtctgtttataaagcaggcaagcctctgcagtgttaatgctatagccctgaagtgcttgcatgtctaccctgagaagactctagcttttcagtggtttaacaaggaagtagattttccaggaatccaaagggattagcatttagcactaattgggggagggtgtagatagaacagagctcaaggctagctgctgtatagtaaaacatccctcagttttctgaatccattttcaatctattcggtccctctgagcatcactgttggggcttgagttcttgtctgtctagatacaagtacatcagtctatacatgtgctcgtttcgacaaggtacactgaggaggtccttaccaaaagaattcttcattagggactacagtaaaagcattcttcattagggattatagtaaaagcattcttcattagggactacagtaatacaaacagcagctcacacagttgggtgaatggaatgatggctcagaggttttactgaacagtgttgttcaaaatcaatccctgttttcctctgtcttcctctccaatggagtgctaactgatcgtggtagtactgcaacacgtacacaggctgccacaagtgtgccatgcattcatttcttggaactgttataacaaagagcaaccacctggatggctcatgcaagagaacttgtttctctcccagttctggaggttgaaattgaaagcaaaacatcatgccaggtcttgctctgggtacctctccaggagggcgtgctgccatgtctcttgcagattatgttaggtttggtcttccttggcatgtggaggcagaacttcagaatgagtctacaccaacacatgatgtctcctcctgctgccccccaccccccactatcccttaccttattcttcctctgtccaaccaaacctttttctcgggtcgtcagtcatttgctgtttgaaatgggtcttactgacccatcctaagttggctacttctgcagagacactatttccaagcaaagtcagggtcaccagtaagggtgagcctagaatttcatttatctctttagaagatacagttcaactcctaaaagtgatagatatggaagtgtaaattcgtactacacaggagaagacagttggaactcattagagtgtcatccaagtgtgagaaactttgctggataggatacgccaagcaaaattacttgaaactctttgtggaaaggcttgtaagcccagactagttttgccatttttagaatcaggaacgtgttagaattaatctgcactgattgattttgattagcatgcatatgttgaaaattatgatgaaatcaacattgatcaacgtttcacacatggggcagatacatttttgttttaatttttaaaagccattctctactttgaaaagttttagaactataaacatatttaattacaatttataatattaacagttgtacttactcttgattaagaatccccgtttgttttttattgcatgataaatgctggcaggctaatttaaataagcaggacttacatcattaaatctgtacacaaagttctttgctttgcagataaaacgaagtaggaagcgtttgtcatgtggctggcagacagttacaggtccacttcctgcctttaacattacaactcaaagcagtgcgctgtgtacaattttaagtctagttatagggaattggttgagagacctcaaatgagagtaaatgactctaaaagtagcttgagtcaaggttgccctgactgtagagccatgtagtaactatgttggaccttgtttctgggaaacagtcagctttgcctttgctgtaggaaggaaacgtgtaaattaattggcaggactatggtccacgaaatcctatttacaaaaactgtgctggggttgagttctgcctgtgggttgtccttggccagctgctggtatagagtactgagcaaggtgctgagcacaaagctattaaaagtgtcaacagagacaagtatatgtgtcacctcgttgtgaaaatatgtggtgaataatgacaccctaatgacagtttttctatgtaattagaagtccatgctttctggctctgtaatttccatccttggagattgagctttgtctttctgttcccctcctgggcggagattttttgatttagctgcattccctccccctccccctgaggctacagaagagagggggaaggaggaagaggacaacataggagcggtccaattatctttcctttcctttcctttcctttcctttcctttcctttcctttcctttcctttcctttcctttcctttcctttcctttccttttctttcctttcctttcctttcctttcttttccttttctaatcttgtgtctaaaaaaccaaagcatgtcctagatttctcccactcaaggttttggtctactgaaaatgtatatttcaacctccattgtagaggaagacagaggagcacagggactgagggaatgtgctgttagctgggaaagtctgttacaacagataagcaggtatgtacatgtgctagctagaaggttattttctggcgtggtttagccttaaggcttcattctttaaaaatatatctccaaggactaccaacttttatgttcatccgcttcattttcatgtacaagcagaaggcaagagaatctttggtcacaaaataggactgactgttagtttctcaactcacagtctatcagctgtgctgagtctttgctccagttcctacaggacagagcaggacctaaggtgtatcttgcaggatctctaatcttcaaggacagagtctgtgatagtgatgacctttgccctgaaaggagactttaaatagcctctctgctgacagtaaatgctccctctgctccaaggcagacatagttacatcttagggtttttgctgtataagtgctcctgggaggacagactcctgcttaaggcggtaagcaaccattggaggattctcagggaacctcagaatgcgttgtcagtgacttctcaggaaccatgactgtgtgaagtttcgggttctgagtgctacgtaaaacattttactagcattattataaaatataatatttatattgtggcacgatttgaagttgttagtaagatcaaaattttggattttgacactataacgtataatgaactctgtatgggtgaaatctcacatgagctttggaaatctctctcaaataatgtgatatcaagatggacaatggaaacttgtatttggggttaatttaagatcaatcctaaggcctcgtgtgtctcaggcaggcacatcactgaactacacttggtcaggtgcaactttttattatgcaccttttcagcatttgttggctctctaggtggaaaatgcagacaaatgattaaatgaatgtaggaagatcggttcatttcatattttgttatctagtctttatagaagagaaagcagttttatttttttaaatatttttattaggtattttcctcatttacatttccaatgctatcccaaaagttccccataccctccccccccactcccctacccacccactcccactttttggccctggcgttcccctgtactggggcatctaaagtttgcaagtccaatgggcctctctttccagtgttggccgactaggccatcttttgatacatatgcagctagccggtagtggtggtgcatgccggtaggatttgctgaaggaggcagaggcaggaggatcacgagttcgaggccagcctgtgctacagttttatattcttttaatcattatataatatgaacctgtgtttcaacccaaataactgacttgctggataaggaagatcaatgttcggtgtattagaagtgaagtgatattgctcatcttcgttatcagtccctgtacagcagagatctgcttcaggctacctagatcccttttcccgctggagggtcagtgttggctggaggtctcaggacaggagctgtgtgtatgtgcgtcctcatgggatggcacttggtttctctgagtctataactgcaggcatgagccaggttgatgtcacatgccttttccagcctttcttaccgaaggactcattggaactatgtgctcacttaaggaccatgaaaattgctcttttctcatcttcatgaaattactgttaataatgcccatcagctggctgttcagagcagtgtgctctgtgtaccaagactgtctctagccattctcacagtcccaaataggcttcttgaaaactatttttccccacctgttttgtagacccctgagtttggggggaatgttgctggacacctaaacttttttattttcattttttatttaatctctgtaagcaaggtatcattttagtttaaggaaatagaagatttacctgagtaacttagcccctcattcctttggtcaccttaatcctcttacgatttaaatggtatgtggaacttccagaattttatcacctgagatctgaatgtctatagatagttacaagaaatgtgtgctgtttctgacctctggcatgactttagagctccctgccagtgaaatcaacctcataaaacttccagggagcattgacttgaatagaatcctgaatgctttcagggctctctgcagtttactgtgcccttgtgctgctcactagaggaagaggggtcccacccagtcatgtcaactaacacttgacaagaagcctgctcccctgcaagccctctgagaatgttccctggcagagatgaattcagacccccttcccctcctcctccacaccagccacatggttctcttcttatgcctttcttttattctccctcttcctttctttcttctcccctctgaagtttctctttcctgcttctgggtgaagcgcctaccctccctcatgctcacctccagggcttcagtgttctctgaccaatctgagcagactgtcttgtgttcctttgacacatgtagcccttatcaaggactgtcatgtgacggtcagccctgtgtcatcacatattgctgtcatgctaagtacctactgctgtcatattaagtggtgataagtggtggcattacaaatattgagaaaagtttaattcagtttttttttctccccttccgatcaaagagaacatcgatggattaaaggaaaatgagaaagcccttgagagtgagcaaggttccaaggaaggaatagccttcaattaatttaaaggcaaaagtcacttctgtgtatttccacatagtattcaaaacagtgttcagacttggcagatacatataatagttgctatttctcccaatttccatattattatttgaaaatcttgatttaatctagataaagagcttctattgcttggaaagaggtaaaaggtaaaatttcacattggaaactagcaaaaagtctaaagtcggtcatttagaacttgtggataaacaatgccaccttcctgagatttggcagccggggccagttccggggccagttattttaaaagaaaggcacgtgggtaaatagattaatatcactgctgtttattgcagagtagtcacaattcagggcgctgtcttaactgtgtgtctatctttagtgaagtaacgtttgtggaaaagttagaggtggttacacacagcgcctctgcctgctcctgcatgccccgtgcgcatgcgcagtgagcattcacagctctcccactcagtggctggctctctgaacccctgcgagctgttttcacttcctttaaattcttatattaacatttccttaaagactttttgtttctgttctgtgctgcgctcatgaccctaaatataccagcttacaacaactggggaatcctccaaatgtgcgctttcgacatgaataacgtggttttgtttggtctgcattattgacaaaggtccttgatcataactcgtggttcgccttgacagaacatggttggtcttccctgctccagatcccccttagagtagcaggcatcgtgttctggaaactatcctgcattgctgttgatagaatttcttgatgtgtaggatatgatgtgagaattccgttagatgttcgggaaagttctcttgtaccttcttagtgtctctttcccctttattccttttaaaaggcattcttggaggcttggctctggcattcttgctaactatgcctaccccctccttttcttctgtataagcaaagtggctttgaggaacatctgagacgttttcaatgtgtaaacagccttttaaagaaatagctgctgtgttctcccatcacaagctgacttgtaacacttgaaagacaaacagaggcctgtgtgttctctgttattgttgcaccccctcacatagctgtctgcgtttgtcagcagtttgttttgactcataatgccagggagggggtggcttggtgtgtttttgtcagttatgcagtgtaggatgtcagttatctcaaagttaccattatgtttggctgctgtccctctatgtaaagaaagcctcagcattggttcctgtttctcaggccagtgttgggttttgaaacttgcccttaaaataaatgccaaactgtttttctcatcttgtaaccctggaggtcagaggctggctctcttgtttcattattgtctcggtgacgtgtttgtggtatttccccagactggtttgagaacctacctgaactgcccttttcaagttcccgttgctcttctagagttggggatcttgtgtattccaacaaggttggaaacactcccaaatcaacatttcattttgaaagcggtactttcagacccagatgactctcctacattaattcgtatggggacatcaacggttgttgtacttgacagaggcagggaccctgggcttgacagggacgccattcttcaagagaaagtgtcccaggtagcctctcctaacattcttcccatttccttagaacactgacgctcccccagttttaggcaaactgtcatctttcccagccaagaccaccaaccttaggaagtagcaggagctttggaggtgaaacacaaaggcaaatgctattgatcttaggccaccaagattctcattggatttgagtcagtacagatgtctgctggctccgatgactgcccgccatgtaaagtgtctggctgccacctctgctgtgtgtatggcttcatcctaacagcaagtgcatacgcgtttactgcagcctgtctcttatgggggattaaaatagccagaaggcctgaatacctagcatttttatctagtatttcagcgatggcgagttcatggggtgaggggtgagactgtgtttgctgtcccgcctctcaagccatgacctttaacgaggggttattttagaaagttcccaattcactgcgggtcactggagcttgggcagaagtggggatgcacggcattttcatagatcacccagcggcttctctacctgagctggaactcatggattgtaaagatttcaagcatttgccctgagtctctgtgtgcctccgagtattatccatttgccaaaggctaagctgtgttcaccacacccctctcttgtcattccttagtgtggtgtggatccagttcacgctcgctgctccagtcctgacagctaactgtgaggcctcttctgaatagtcagtgcctaggatttaagctttattttgtgtttgtgggagcatcctagctgatagtttagacgttgaactccgtcttacacctttgatgtcctactttgttgaggggtgttcaagtcagaaggtttcacagataagatcttggaacccagctgggggtcaggaaagactgcttgtgaggaaatactttggatctaatgttaacactcctgtcggggcatggattggactcaggtagagaagtgtaccacaggagacatttaaggacgtagagaagcactcctaagttggagtcacgtgagaacatgttttgttgggttctgagtgttcgatggctaagcactgtagggaatgggagactgggtgtactgtagggaatgggagactgggtgcactgtagggaatgggagactgggtgcactgtagggaatgggagactgggtgcactgtagggaatgggagactgggtgcactgtagggaatgggagaccgggtgcactgtagggaatgggagaccgggtgcactgtagggaatgggagaccgggtgcactgtagggaatgggagaccaggtgcactgtagggaatggtagactgggtgcactgtagggaatgggagactgggtgcactgtagggaatgggagactgggtgcactgtagggaatgggagactgggtgcactgtagggaatggtagactgggtgcactgtagggaatgggagactgggtgcactgtagggaatggtagactgggtgcactgtagggaatgggagactgggtgcactgtagggaatggtagactgggtgcactgtagggaatgggagactgggtgcactgtagggaatgggagactgggtgcactgtagggaatgggagaccggggctttggatcaggctttccttgtcccttcctccagccttgatcatggtcttgtaagtggcagacgtttgcctcccgcctgcctgtaccttgagctgccctttatctgttctagttagcatgaggttgggtgatactggcttgcatgtttgtatttcacatgtttcaccttatttgatgcactcgtgtgaatcaactttggataaagtttgactggcaaatcttgtgaaggtactttatcgtgccatgaattaactttttattacagcatggagaatatctttgggaaaaaaaatactttaataagagaaaaggttgcttctgcctgtcccagaagctgttagaattgggaacaaaacacccatggccttacagagacaaagtttggagctgagacaaaaggatggaccatctagagactgccatacccaggggtccatcccataatcagcctccaaacacagacaccattgcatacgccagcaagattttgctgaaaggacccagatatggctgtctcttgtgaggctatgctggggcctggcaaacacagaagtggatgctcacagtcagctattggatggaacacagggcccccaatggaggagctagagaaagtacccaaggagcaaaaggggtctgcaaccctataggtggaacaacaatatgaactaactagtaccccggagctcttgactctagctgcatatgtatcagaagatggtctagtcggccatcattgggaagagaggccccttggtcttgcaaactttatatgcctctcagtacaggggaatgccagggccaagaggtgggagtgggtgggtaggggagtgggtgggagggcatgggggacttttgggatggcatttgaaatataaatgaagaaaatacctaattaaaaaaaaaagaaaaggttgatttagctcttggttttggaaagtcatggacattgtctttgaagtcacacagttctagtgaggagcttgtgaatggcaataggggaggcagacattagtctgaattccagtcctgagtagcaacagagagaatggccatcaccagttgtgttcttcttgggaaagtccttcatgacaacttaatggccaccctgtaagctacctcatgctctagtggcctatagttcatccactgtgagccacctctcaagctttcaggttttttcagcccctcccactactgagctctcatcagacagacccttagtggactctcaggccacagggaaagcacaccgtgtggtttcagcgctgtgttggttggggtagacacgtggcctcacattatagctgcaggtgactttagctgtcagtaccacaggggtttatgtcttatttggatgtcctactgtctctttgtccctgaaaatacaaagtcagagactgtacctttttatagactttaccggcaaacatatcagagtctgtttctctcatttcttcattggagaaacacctccgggacgggtgggggaatgtttttaaactagttttcatctcttttgtgatgctttgtaaggcggaaattgtaacagtattaccaacacttcctgtgacaaaaagaaaacagtacaggccttggtagtgctgagttaatggaaagtattatctccaggggagaatagtttccgccaggaaggattgcttcctctaggagacggagtccaaggatcagagcatgtggcctgcaaacagacagccttattaggtaattgtagaggactgtctgggaggtggtccaccgtggttcatggggtcgttaacgttgctgccatagccagtgctgagttcttagggtttcagcagtaggactgcgtggccgagaagggcgatggagattgtcaatcactgcacatattctcttctctccatgcgctttctttttaatatccaatgaattcgatttccctggatcaaagtcccagtgaaaagaaaagcaagtgaatattctcagtagttggacttcctgagtgtataggtaatccaagtaagtccatgtacactgagatagccctttaaatcaaaatggtcacaatgttattgggctgctttgaactggcgttgtagcaatagtaaatgattttatttccttattaattttaatagctagagtttcctttagagtaagggtaatcagaaaatttgatgatgtttggaaaatttgaatactgtctcaggctattataaactcagatactctagactaaacgatgtgacattttaaagcaggtgttaattagctttgagaaggtttcccttttgaaatcatggccatgccaccaatagttagaagactggttaagtccccagcagatagcaatcattacagttggaaggagagacggacagggtggaaccttgtgctaccacgtgttctgcagaatgaggtaagggccgaggactaacgctggccttccttcttgtgacaaaaatgtgggaaagaccatttcacctaaacttcctctaataatgtgtaatttgtcagaagtgacaaaaccacattggaaaagcagcccacatttccaaagtccatattttgggagttgtataaaatcagccttcttaaatatgagtttttgaatcacattagagactatcttagtgtctcttctgcagtttggactccaggaatggaaggtaaatttgatggttactaagttgttcttctttttttgtttgattagttttgttttgttttttgattgtttgttttgtaatattcaggaggacagttacttaagaattgtagtcactggcatacagtagcatttcagatccagacatatgacagagcagtgcccaggaggcttctgttcctgagcggctgaactgttttctcaccctcttgaacaccttctgcctgctgcaataggggacacctgtttcgttcctagaaaatttggtgtgaaacactcctttgacctttctggatgcttggctaaggcatcttgtgactgacgagcctttcttttaaaaggtagtttgtgttcagaactgaaagtcaacttaaacaagcatttcagtcagttacccccaaatgaagatgtggcatgtttgtctcaggatcgagagtgacattaaacctgttagtgtctatttttttctattcaattccatgctaaaaaatatgggactcacatattatttttgttgtttgtttctaaaacttctacctttcacatgacttgatgtttaaatatttcctgtacgtaaaaatgagtgagcttacttcctggctcattcattcaataaattccacgttattttttactgatgagcattacatggcactttctactgccaactataataaaggttggtagttgcttccaaggtcttttttctgcctacccctgttctgtaggaagtattttatacatcctaagtaaagggaatatttcacaggttcagatggacctagtgtggcctgtgtccatgttccccctccattctctctttctgtctctgtctctgtctctctcccgctcccccgcccgtgtgtgtgtgtgtgtgtgtgtgtgtgtgtctgtgtgtctgtgtgtctgtgtgtgtctgtgtgtagatcagaggctagtttgggttgttttatttttttcccaggaaggctctctaatttgtgtcttgagaccaacattgtcaatggaatgtggatccaggtagactaggtgacccgtgagtgccagagatcctcctgtttctttctcctctaactacaagcacacacattcactttgtgctttttacctgggttctgaggtccttaggcttgtctggcaagtactttatggactgaactgtcttcctatcccttaacctcaagacctcaaagagctgaaagggaggtgagggtactggcgttctttttcccatttcctgatccctgctggctcaaatatgaagacgattaactagtatcccggattccttcaggatggcacgaggagtataggcacttaattatcctgtggactctagagggaaaagacatcagtgtcagacattctgtattttgtcacgcactgcgaaatctatgtgctcaaatctctcttcatgttgacggtgtgtgctatttctattacattctttgatgttcaggtttcagattgtataataatatatgaaggcattgtcacatgaaatattaagctttagtaactatacctgacttaaaccataagcaagcattgagttcatgaattttcagcattatatgttgtgatttttattagacagttttatctaatgttaaaccatttgaagactattttcagtcttgatcgatttaatggcccaactgagattaagcagggtggtgtctacccacaatcaagatctcctatcttttcattctctatcttcctgttgctctgcctttctttctgttcctctatgaacctttcctttccccatgtacattgtattggggagtggtaagcgctggtatgctctaagaggctacttcactcatcggacttaatcgaggccaggtgcctggcaatcctcctgaacacacacacacacacacacacacacacacacacacacacacacacgctgatcaaattgagtcagctgcttggggagcttgcgggcttacattataatggatggaaaaatgccctgtgctttgcaaccttttaaactaagtaataacatttacgagaaattgtgaatgttatgggaaccactttccatgtgggagatgactactaagaaaaaaagtttcctaatgatgaatgagagtttttcaaaagcacggtttggtttgtcatcttcagttcaaaaggcaacttacatcatcacactggggaaagagatgtagtagctaaatgtcagggtaggtccccaaattatttggttgtgttttgtgacatcgagagacagtgcccttggtagaatcattgtaaagcacacttgaagttctatgtggaaaaagttgaaagaaggaccagaacattctattggtgccctttccaagctgtgtatttgtggttgtgccaaattctgctacgtcttggatgcagagctgtaagtgcctacagataccagacatctcatatcttagcttggcagtgaacatatgtagtctgcctgatagtggtccagccatattttgtaatttatttcatatatgaaagggaaagtaaaaggaacgtttcctttcctgtggatatggggtaacctgaatatcaaagctcatctcctctgagcttggattggtttaggagtcactgcatttgcgtgtccactcttgctttcctgttcattttcagacatctttagtgtcgtacatctgtgatgtgatattagcaggaatatgttttcactacagattttctttttttctgctctgtcattgttattatcattctatgcagtctgcagtttacctgggagggaccaatggtcagaaactgttagcactgctcgactcagccctccatgcatccattgtgttacctggaatctctaactctagtttgacattcctcaggcacactcccagtcatggtacatccatatttatttatttattttgtccatgaaacccactttagatgtcttgagtgtttttttttttcttccctatgccactcaatgcgttgtctcttaggtctcccaggtttccctcatcttttccctgtttggatccattaatcacaggccatgccagtcttcctagaaatgttctaactgtataatttgggcagtctcctaactcttgagtctccgagtgtccctacttcagagtggggcattatagtaatcaccatagtgaacatgggaggattcggaaggatactgatgcgtgagttgggagagttctgaaataagtgacagttgctcttgtcatcagtatgacaattacttgaaaaaatagaaataagactagtggagaaagttggtgatgaactaacgaaagcttaaaagtatggatttgatattacagaagatgtgtggaaccagcagaggttcctaagccctgaagtgatatcacttaaaagaccttgaagttgtgatttaaatggtttctatagtgatgggaaagatcaatcactaatgtaagaagagctgtattttgtatcgagatgtagtgctgtttccaggtcactgtgtcttatttcgtgttttatctccctcctaactgacattctgtttcaagcttcattattgcatagttttattacttcttaataagtggcttgaagaaatcattttatgtatgtagtgactgttagtgtgttcacttcatggtcaaggagatgaagcaaaattaaagtcgagtcattttaactttccagagtgtttgtgtttgttgtttacttcattgaaaccaggttggtaagaatttacattttgttaagtggattttaactttcaggaatctttatgccctaactctctcaaagacaggattcaggtttaagtgaaacggaatggaaagactagggcctctctgctgctgcagtgcacgatttatatctcgataaaatgaagggtgtgaggtcacctcttatggtgacatcatcctttttatatcagtgttttcctggcttaacaccaggaagtgtaaatcaagagcagatcaaaatgtccactaatgtcaagtcaccaagcgctttggacttttcacgctctgtcaggagaaaggggcttgactctaaaatccgaagcaagcttttagatggccacaagcttctagcttgttcacttgcctcacccccaggttgttagcctttttgtgtatatgtgcatatttgtgggtgtatgtgcatggccatatgaaggtcagaggacagcttgtgggaattacttctctctctccaccatgcattctgggcactcaactccggtcgccaggctagctagcccttactccaagagttttctctgtttacgcatcatacttgagctcctgcatagatattggaggagcaggccagccaaaagggaattggcatgtaccaaactgctctaattggagttagtggtgaggtccaggacggagggcactcctgagcactagggaggtgctgggtttggctctgctggtctaacacttccataaggagtgggaacctctgggtcttgctgtaaggtggaaggtgaagttaccctgtcagtatctagactgaaggggaaagctgaaggatagccctgcctttactgtgctgtctgggtcactgtgtgcgagctgtccatttcttccacatttcacccagagtcacacagttggcatctcgatccgattttaagaaccctttaggagaaaacacatgtcacttggcgtcgactccatgctgggcaccagggaaagtcacacacagacacacagacacacacacacagacacacacagacacacacagacacacacaccacaccacacacacacacacacacacacaaacacactaagactgagagatgagggcagaattcacaaaatgcccaacactacagatttccagagccaaggatatgttcatggtatttaatcctcttaggacacaaatctgtgtgacatttgagcaaggttttaggtacatatttgtgaacttgctcggatggcagactaccattttctcatgcataagcaaaagaggtacttggtatttgaattggcatctctggtatgactccacggatatcataccctccaaggtctttcctacagaaaattgcctttcagagtgaaggttaagcacccagcccttctcgctctttgaatattgatctgagagcctgtgtagggctacaggctccaaggccattgtaagtctggagctgttgggggggggggtggttgcgatgctgaggcccagaagaaacacacccctgggcttcaggctgagactattttcatcaccagcttctcaggaggacagaaagcagattgacagaagctatggccacaagtataacatagtaatggcgctggtgaggggcatggggattccacagtcagaaggatgcaatagcaagggaggtggcgggtagggaacactgtaatgtaggtcccaaagagtagaagattgaaggagcctggtccttttttttttgtattcaggcacgagaatttctgtcctagagttcagaggacccagacacatgggagctccagcataagaggtcagttgcagctgaaaacaaagaggttagctgtaacccaatcagagaaaagcccacctgttccatcacagctgcatggccccatcctactagcagtaggaagagtctacaaggctactgtctagcagtctcaaaataagttgattgatttgaaagtaaatttagttaatcagataatgtgaaatttcccaagtgtcccttaaactgagccccctttcctcaaatttctctcctactgttatagaaatagtttgtgtgtagtgaactgtggtagccacaaatgggaattcagagctacaaagaaacaaaggcctgtcactgcatctggctacctcaccagaagtcgcttaagcggtctgagaggcttctgtggcctgagaggtagagatggcattaggccaggggactgactattttagtggccttcctattctgggtggcttttgtcagtgacaccagtcatagccagaaacagctgtttctgtggagtccagactgccatctatttttagtagaagctgggagaatgtcagaggtgatgtttgagtttctccgcccttttgtgatggtctaagattaggctgtttagaccttctgccctctgtcatttcacttattgaattcaagcacagccttttaatttcagcacacgtaagctctggggccattgaaccggttctataaacaaggacttttctgagccacagataggaatacaagaagtacacagatagcgtgtcagccagcagttggtttgagaggagcaagacttgggaggcgtctctgcactcccctgaaggagcaggtctgctgctttgatttaagaagcccggatgttacagagaacagcaaatgctgagagcttggtgaaagcagctgttcagttctctagacattgctactctgtaagctttcactatgttgtatgttgattaaacaacaggtatatctcagcgaaaatgcaagatagacaagcaaaacacaatagaatatttgggaacaaaggataactgttgactaggaagacattttcattggaggccatattttcccattgtatcaaaagggtccttgttttacctggactctattctaagtaagtttgtttcctttggccctgagtgtgcttcagtgggtatcagcctcccagcttgtaactgattgtgaacattgttttcctttccgttttctaattccaagggaagataaccaagttacactccttccaaatagctctgcttgggtacaggatcttgaccagctagattgggcaagatttagtcaaggctgttaggatgctgcctgtcctgagaagggaatcgtcgtcatagaacagttacgcctgctgaggcacacccttccttgcatgcatctttccttgagcacctttccagtggctacccatttagagatacttaaacaccctgtgtacatcttgtgtacaaagactatatgtttgtagactaatacaaaaagtagaaaacataattatagaagaagtatatactagagtttatatgtgtgaaaaatggaaattgagcaaatgatggcttcatataatgaggcttccttttgttattataatgggctttatgtgttgttctgggactatcatgaggttgttaagcaaaacataaataaagcaaaatccgggagagtgtatttgctggagtaatgctgagatgcccacatgtaagtctgctcatgtttgaactccaaaaaggaggaggaaggcacagttaggatcttggaagtgcgctaatcttgttcttaaattggctccctcttctttggtgttccctaagcctacaaagatacttgaaatgatagaaaagtatttaagaatgaaaggaagaaattgagaatgaatcttgatttgttgttgtttacacttcagtatttggagtcagccatggtcactgtctggacaaccacagtgctctctctagagtgttcttggagtatagcacagctgcagtatgggggctaacacttctgaactgtgatgacctttgctgcacaagttcccaaggatctgcactctgagtgtgaatttttaacagccatttaaagacgtgtgtgtgtgtgtgtgtgtgtgtgtgtgtgtgtgtgtgtgagagagagagagagagatggggaaagtactaactggttaagtcattttctctgatccatgacttttaggaaggtgaatgaataagctttgaattgtttatttgacattgaaaaattatatggatccctaagtctggtgaagcatcaacaaaaaaaagtatatgctcatatatacatatacatatacatatacatatacatatacatatacatatacatatacatatatatatatacaccccacacacataccctcacaatatatatgtgtgtgtatatatgtgaatatatagtatatatacataatatgtgtgtatatatgcatatatagtatatgtgtatatatacatacatacacacacataaatgacttgggaatgttagtggaatcctttgaagtatttttgtgtgaatatattttaggtttttacataaaaactagaccaagaattaaataagttttcttcatcttctgtaactaggaaaatagaaacataacatttttcattttttggcattttcatataaatgattatggaagtattgggtgttatggtatcttgtgataactcataaccatcacttcgtgtctcagctttaagaactttgttaaaatattctttatcaatatatctataaatattcattcaaaaggttaacattttgggagctagggagatggcttattgggtaaatgtgaatgctgtggaagcaaaggaacctaactttagatctctacatagaagccagtattgaggggtggggacagaaagacacagggattccccagggcttggtaactgcttacacaaactgaaatggtggagaatgatagacatcagctgacatcctcctctggtctctgcatgtgttatacagagggatgcacacccacagacacatttacacatatactacacgcacaaatcacacacaacaaacatcaaacacactcatgcatatcacaaacagcagacaaatcacacacaatacatattacacacatcatgtgcacacacaacacacatatcacacatatatcacacacagcatatcacatacacagtgtctcacacaatacaaatatacatatcctatgcacatttcacactgcacacatattacatgtcttaatcacattcacacatatcacatatgcatatatcacacatcacaaatatcacacatatcactcatgccacaaatactacacatatcaaccacaacacattatacatgtcacacacaacagacatatcacatatcccacacacatatcacaaatacagagttcaagttttaattttataaaattaaaattccagtttcttttctaggacaaatcaaaatggagctgcaagtatcataaatagacaataaaagtataaagtcttttgcaacacgtgtattttcatcacatttctgtccagtctcatgtactatgagaactctccctgtattggtttttcttgggttttatgctgtaaaaaattttgttctatactcctagatttttcatttctagtttgcgtgtacttgaacttcacagatattaactatagatgggtttaaaataaatggccattgttgttttcatttttaatgagtggttttctttagtcgccacaggatggagtaggggataccaggggacagacacaggacttagtgacaccacctgcagccatggcagttctgttcttttatgttacatgtttttcctgtgttcaaatgaaacattgctcctgctactttactctatatgcagacaaaacattcatgagcatgaaataaataaataagtcataaagacttaatagaacttcactctaaagataaagatttaatctagaaatatagtcctattactatacaataggaaagagtatgaatgtggctgtgtggctgttgagtacgctatctagtgacactgaaagaaagctctactttgatagattttttttatgtgtgtcattcagtgaaaaatttggtttatagtagatttctgtagatgagagttggaagtttctaggattattgagtcaaataaacacacaccacacacatacacacatacacacaacacacacacacacacacacacacacacaactgaattgttcctgaatgtcttactccttactttcaccccacactggatactaaagaatcggttaatttgattttttttatttgaggagcttcctgccctctattaaagtaatcacaatttggctgtattcagttggttcacaaaactaaatctagccaagtgatccccaacgtgttagacaaccagaagcctgggagtgttagtgtaaatgctgatccagtgcatggatctctgctgtgtaggctaagctgttatgaaatcaagtgagagataacgagagttatcacaaccttttggttttgccagtggtcttgtttattgacttagtcattttctcctatcagaaaagaaaacaaaaacaagcagttgactagcacaggagaacagttgaatctctaaattacaattctgcactctacatttctatgcatactttatagccggctaaagattctgaaatcattggatgagtttaagtagctgaatactttggtcactcaacacctcttacctaaattcacttttctcctctagtacattctatggtactcacctggacaaaaatacttctgttgaaacatcaggagtgtttgcttccataataaataggctagacatatttactgattacagtcattaaatttgatgtttgcattaaacaaaacaaagggaaccaactttcttggggatgtcgatttagctattttgccaggtcatcatcatctggattctagtatgtacatttgttttttattgtgtcatgttttttctcattatcttcaatgatcatagaaacattaaggcacataaaagctttgggtgggaaattttaattttttttccaaacatacttagacttgaggttaccttgattttgtgcaattgttctgccttaacatccaactgagtttttttatgatagtaatagcaatgaaatagtaatgactaattatcccagcagccatcaactcaatcaaaatgtttggttgaatttcacttgaaggcagacttttgagtagtttccagtaccacccgtcacctttcccatcttagtaattctgagcccacaggactgtcgaacgatttgcaggagggtgtctggctgtgtctgtgttctccactgaacagaatgatgcctgatgtaaaggaggagagagcagattgccagaagtggtgcgggcgccaagtggtaatggctctacaggcgtccagcagggatagctgctattcttcgcccagtgcttctgggttagcccacccatgatgtcctagtgctgattccacatgcactgcagcttagcacctgagaggtgaatctttttccacaaaattacacattctctactcttgctccttaaattataaatgcactattgcttttggccctgcggggcataattttctaaatcttgaaaaattaatttctgtctggctacactgaggaataattgacagttaaaacgaatttgcaattttaatttgaactagttttatagtaaggagaaatatgactatttacaaggaaaagaaaaggtggcttttaatgatttttctcaaaatacctatgcttacaaattctgttgtaagggtgctgcagcctgactcagatattgctctctcgggctaggttataacttagattattcagtaaaatttatctgtgtagtgagttttcttttaccccgagtctggaattatcactctttaaagttctttcctctatgaaacaaggctagactgagattcacctcccgagactcatgttggaggttgcctttgatttaatttattttactttcttatgttttgtttgtgtttgtgactatgaagtgagatattttctagactttttttttaaatgaatttgttccagttttcccttttggggaaaatggacttgccgctgtttccttgtttatttagttgccagatttcacctgtctgaaaatgttgttgcaggattttagctttaactgttattggaatattattatctttgatttaatatataagcttttatccttcacatcatccttgaaaatgcattttatcatctcaggttttaaatagatccgagatgtaaaaggcgatgacttttatgtatattttgtagagaaaggaattgacaaactggccatttaggtggtgattaagttggagtaagaaattagggctctgatattaagattttgagtatatttgacattgtcatcagggaacggctctatcttacataacattcatattggaatgggaagagcaaagaagtgtctgccatttgctctgtacgtgtcttgtctcagtttccctgtgttcttactccttgtagggctctgtgacactctcctgtcctcgcaagcagagtcttgctgctctgcatttcctcctatattgaaaactatgaagtatgtctctcagccagctctgtttgtactggctcagaaaactgagttttatcaacttggatctgtctcaaaattgcaaggaaaggcctacttttggagttgctcagcggggctcctctgcaattcaggaaaaagcctaattaaggtttcctgaaactgccttttaatcactgggattaccatgaaaaggaacgtttctaatcacatacatatctgctaatgcttttcttgtggtatctgattactttgataataaaaagtagcaataaagtggagagttaatgggttttaaacatgtggtttctgaaccatataagttgtggaataggtacgcttagtgagtccaatagagttttaaacatagactgtgaagatgtatcacatacagttgatgaatagtcaacctcacccaacggttcctgggaagtggaggctcttgtatgtaacagaaagtagaaagaaattaaaatcgtgttgtgacctggacattggtgagtctcctctgtggcttcaggtgatccttagctcctgattggctcttgttttctgaaggtagtccagctggtgagttacagaacgcctcttcaaatgtgaatcctgggtaccgagagtgaaaattagccactttaaataaatctattccacacaggaataatctcctgtattttaatgataaaattccactgtttattttcacaagggagaaaataaggttgcaggccagggaagctcctagtagtattcgaacatgctgtagtgactgttaagaaattcagttgatgtcgatgaccaagagaacacattctctagtagctactgctttgagttggctccagcgcagggcaattcattagcagctgttgtcagtccatagcagaactctttaacctacttggcagcctccctacatgagcaatgagcttctttgcagagtttgacttttggacttgatgggatattagcttacagttctccaagtcaagtacacagtactaaaggtgttccttctgtttgtgtccaaatgcgcaaatgtcagacttgagcctggctgctttgcgactttactttgttcttgatactgagcgcggactgctggtttcttagagtctcctctcatttatcttaagagtctcttcacttcaggcatcaaaaacacatgtgggttcagtccacatggctgttttgttacttaccattgaattgtgtgtttgggaccttcgaccgtctgaacccttatctgtttgataaagaaattacccaaccaggatttggaaagaaaaccaggaaaaaaataaataaaaaagacagggtggtagtttgctggcccagcctgggatgtgtctgcattcctaaatccctgcctttaagtttatggctataacaaatataaacagcagtgaacaagcacgaagagcttttattacacacacaggagttaaagatgaatctcagatggtggtgaggattacattagtcattcatacacacaaggtctctctatataacccagcctggcttggaactttccggcaatcctgctgcctctcccacctgagcattgggtgctaagattacaggctgtgttgtcatggcctttggcttccctggtattcgtaagcaagtggctacatgtatacacgctttaccgggttgagaaaagtctcccagtgctttcggatgagtagtgagtactccggtgtggcagctagttctcatgctgaccttgcttccagggaagtcagccgactgttgacacggtttttagtagtcatattccatctgtgtcactgagttgggctacattagttatctcccaatgtgccattcaaatgttgtgtcttctgtttacaatttattaaaatataggggagtataagggaatgaaagtgtttaaagacatctttggggtgtgcttgttttctgttctcatcttcccacttctatgtatgtgtgtgtgtatgtgtgtgtgtgtgtatttctaaatacccttctgtgtgttgcccctctgccagtgctgcccatcattgaacgtggcatgtagctatcatgtagtaataagtcctagattagtcagtgtgggcgtgaccctgtcctagtgctggttctttctgcattttcacttcagcaagtggcatagaatggtgcatggagcactcatgacaacgggaatgggaactatgatcactgtctttatccttatggattttgggtaaatggatactcggaaaatgtgtctttcaaatgaagaccacaacatgagtacacatgttggttcttagaggaacatgtcattaattgctaaattttagtaatgatgtaagatttggaggaagaccattaaatattttaacttgatcatattttgttaaatccttaagtatactttttttttttaaaaagaaagacaaaacaaaaccaaccaaacaaacaaacaagcaaaaatcccaaccttttacctggaaaagatgtagtagctctagctggccttttatttttatttatgtgtatgagagtgtgtttgtctgtgaatgtgtgtgtgtgtgtgtgtgtgtgtgtgtgtgtgtgtgtgtgtgtgtgcaggagcctgtggagtcagaagagcgtgcctgataccttggagttggtattacagggttgcacgttacatgtgagctacctgacatgggtgttggtaacctaaccaaactgggtcctctataagagcaatatatcctgttatctgctcagccttgttgtccacaccccatgctgaccttgaactcaaatcattcctgcttcagtctcccacaagctggagctgtaggaaggtgacttcacttcatgtctgctggcagattatcttaattacacacacacacacacacacacacacacacacacacacacacacacacacacacagacacccttatgtgcaagatattttcccaatgaattttttagaaggtcttcatgaaggaggctgataacacttacgtttaaaaacctaatctcgaccaaatagctagaggaccaaaaatggccttcagggagattctataagcagcttccttctgggtgtcatgtgtcctaagtatacagagaaggtgtgcacttgtcggccgcacagtgctagtgtaacagtaagtaccgactgaggtgcgtggagatcctcctcccaggcctcttctccctgcttgtgcctgtgtggcagtggagggacactttgctgaggtggttgctctgagggcggtagctcatctcccccgagctctctaccaggtaggtggccgtgggtgttccagcctgctgcagaggatcaggtttgtacaaaaccacaacagaaagatcctattcttttaagatttaaaaaaaaatctttaaatatatgaataataacacattgaagtgaaaattaaatacctctccttttagtttttaaacacacagcaaattgcaattactaatgaatagacctgtatacttttttttttcaaattcttctagattacaaaagtaggtttggctaaaagaaaaatgagaaaatactgaaagtagtgtcatctgtgatgaaacgtttctctcttgaccgtatgtggttttgtatacaaaacctgtaaagcattactgatagtgcttgttcaacactaacaaggaatatcttttgtagctcagcctcatttggattgctttatactgggaaaagagagagagaaaaaaatcaattttgttttcaaaacattccaagatattggtcagcattttgcatgagctccaagttatcttacatcccttttctgcagttttctcctattaattttcagttcagaattaaccaaactgctttagtgagggttgtggcaactctcatatctgagtggcttttcagccagatgtttggaacagcttagataggggccaagccccggtctagctctgtgacctttaaaaagaatatccgcttcctgacactagataaggatctcccactcaccgcctcttcctctttagagagctcttacagaatcagttcattaaactatgtgaagtgacaaattatgcttttggtttaaagtggtggtcagtgaatatttgagaatagaagtacctttccgtggagaatttggtttcgttgtgctcaggttcctctgcatgctgactgtgtcttttgtttgcttgcttgtttgtttgctattagtagtgtttgctagttcacctttctaccactcagccgtaactccctgccttagttaagctcggtaggttctttcctaagactctgtgttgaccagtgcaggcatagaagtcctttctttagttcaacgcatgctacagtaaactgaaaagaaaaaacaaacaaaacaaacaaacaaaaaacctccccaaacttctgaggtttgagacccagaacaagttttatttggtttgctcttaatttaccaaccatttaactctttatcttctcaagtgcctgctgtgtacagacaactctggggatgttgtaattcctgtcacttgttgcctatcttaaagaatccccttttgttctcatttccccctccctttcttataccttttccccttacgagcattcaccagtgacaattctttgaatataacgtaaggaactggaatggtagaattctggacaaaactgtgggatctcccaggcccagaaggattagttccaacatctgagactgggactttgctgggagatgagtggtctctcaacagtaccatgaatttggcattgtgaagctataatgctgtaaacacagggcttctaatatgtcttagatggggggaataccttagcagtgggttgggtcagatgtcttcaagtgagatgtcagggaaagtatggttatagctttcagtttgtgagaatgaatgttcagaaacacagacttttaaaaattaggccatcgcttgcctcaggtgatgaatgaagttctctgacctgtgctttagaaagatagtcctgaaagaattttgaaaactgtattatagttaatagaatgtagccagagggatgactatagatggctatatgactgcggtttacataaatgaccatggactctgaatcaccagttatgtaacagtacagaggcaaaagacagcaagtgaagaggaggaacagcaaggacgaggagcaggtacagtgagaatgaggtgcaggtgcactgaagaagagggacaggtgcagtgaggatggggagcaggtgcagtgaggatgaggggcaggtgcagtgaggatggggggcaggtgcagtgaggatggggggcaggtgcagtgaggatgaggggcaggtgcagtgaggatggggggcaggtgcagtgaggatggggggcaggtgcagtgaggatgaagaacagatgcagtgaagatgaagaacaggtgcagtgaggatgaggaacaggtgctgtgaagatgaggaacaggtgcagtaaggatagcatgttcagtgataatgaggggcaggtgcagtgaggatgaggagcacatacattgaggctgagcagcatatgcagcgaggctgagcagcatatgcagtgaggctgagcagcatatgcagtgaggctgagtaacaggtacagtgaggatgaagaacaggtgcagtgaggatgaggaacaggtacagtgaggatgaggaacaggtgcactgaggatgaggaacaggtgcagtgaggatgagtaacaggtgcagtgaggatgagaaacaggtacagtgaggatgaagaacaggtgcagtgaggatgaggaacaggtacagtgaggatgaggaacaggtgcagtgaggatgaggaacaggtgcagtgaggatgaggaacaggtacagtgaggatgaggaacaggtgcagtgaggatgaggaacaggtgcagtgaggatgaggaacaggtgcagtgaggatgaggaacaggtgcagtgaggatgagtaacaggtacagtgaggatgaggaacaggtgcagtgaggatgaggaacaggtgcagtgaggatgaggaacaggtgcagtgaggatgaggaacaggtgcagtgaggatggggggcaggtgcagtgaggatgaggaacaggtgcagtgaggatgaggaacaggtgcagtgaggatgaggaacaggtgcagtgaggatgaggaacaggtacagtgaggatgaggaacaggtgcagtgaggatgaggaacaggtgcagtgaggatgaggaacaggtgcagtgaggatgaggaacaggtacagtgaggatgaggaacaggtgcagtgaggatgaggaacaggtgcagtgaggatgaggaacaggtgcagtgaggatgaggaacaggtgtagtgaggatgaggaacagtgcagtgaggatgaggaacatgtgcagtgaggatgaggaataggtgtagtaaggagagcatgtgcagtgaagatgaggagcaggttcagtgaggagagcttgtgcagtgaggatgaggtacatatctttttgagatgattgatgtgagagcacactagacatgggatggccactcactgtaacaaaagccgtaaaggagtctatctgatggattcaaaagccatcaacaggtgattaaagatgagagaggaaaatggaaagaaagcaggagatagttggagctggaagtaggacctcaagagacaaccctgtctagtggatccatattgtgaacagaaaacattttaagtcatctagcagtgattttagaaacattttattaaataatttattttgcataaaatgtctaaattatcttattatattaagagaataattctgttctctgtgtgtgtgtgtgtgtgtgtgtgtgtgtgtgtagtagagcacactgcatggcacaggcatggaggtcagacaacaacttgtaggccttggttttctccttccactgtgattgtgtaatgtgtaggtcctgtggctagaactcgggttttcacgtttgttggcaggtgcctctatcaattgagtcatcctgcccacccagaataatgaattcttaatgaaatagtttatatgtttttaattcatactgtcttaaaatatgctatgtatttgtcctaaccacatttgaagtgcagcgtctcacatgtgtctcatggtaattgtttccacagtttatacttaagccattttcaaaagtcatctactatctatgtaaagtgctgcagctgggtagtttaaatatgcagtcagagtgccatctgagtgctgccagtttcatgggattaagttgtagcttaaagaaagcatacaggcctttggatcaaaagaagaaacacactggtagcattagccaacatgtgctcctgtaatagcatgccttactatttttattaactttttcatgctttaaacatgattaaactgcagtacattttagaggaaatgcaaatttaaaagaatgacattgacagatttgtaactccttcaaggtgtgtaacaatcacaaatccatgttttttccagtgactcttagtcatagtaatcaacctccatattattttaagtttcccctaatgttatatcctacctcattgactgaaattagaatgacagaacagataaatacagctatcacttcacggaactgcagggatcaggagtaaaagtggaccacagctctcttgtgtcccacactgcaagatgggtctgcttccaggtgggtttctggctaagcaccaagggtctgaaggaggtagtccactccaggaaaatcaacgctggctgtccctctggtgtgcttggcactttttagaggagatacacttgataggagagagcagcacggggatgggggagaaatggagccacacagagtaccataggaagaagaatcagtaagggcttgagaaagatccccaggcctcataaatccacagcctctttgcttaagcagcaagcctaaagaactaaatagaggttccataattattctgaagattgtgtattttaaatctcgtgggtaattatcacagctaaaaattacacattacaataatcacaactagcaaattacctggaattgcttgctcagtggatatctttcagcacccgaaatttgtacataaaatgactattcatgagagctatttataatggagtgcttgttagcactggctggtgtaaagactttactgatttctctaattgaatttccatcaacaccgcaggtttcagtgttacctgtctaagtcaaggagttatcttatccttaaataaagctgtgaaagtgtactggtgaaatgaagtagtatatcaaaatatatatgtgtatctgtctgtataggggctggattggatttcttgttaagtgttctttcaaatttgactttacccattaatgaatgatgtatgtccagggtgccggtgctcagtgtcttggctgcttccatgtggctgcatcctgacataccattaatgctgtacctaaagggccagttgcacatcttccgattccctcccacacacagagacatgtgaatgatttttgtgagtagacacctttagatttgaacttggcctgtgctctgagtcccctggactccctgggagactccattgaattcagcatttaggtctggtctttcctttggcccttggcgctctgacttaggtgtcagtcggcagcccagggggagaggccactgttcaacctctcttcaggcagatacttaaaaagtctcctagagatgtatgggatttctctactagaaagatacggcatgagtaattttgctaaggtcaaagatgaatttttgaaattaaaaagccaagggtgggctgttccagctgggtatgacaggatgtgggaagatacccttgtgcccgaagcagcatcactgttcaaagtgccgagagcctgggtgtgaaccttgcagccatgcatgcgggttggggcagggtggggccggggcactggaggtagggccggggcactggaggtagggacaagcagaggaagctcccatcatgtatgacgcccacttaagtggggattcaagtgtctcttgagtatttcaaacttacatcaccttagaggcatgttatgagactctcaaattattaaggtagttcagctattttttgatgactttgcattgttgacttcttgccaaaaatcatattttcacacacatgctcagagcactctccttttctccctccagcatcccttggatctttgagaaccttttctatgctcaggctccaggcgattgtgactagaggtggagtcctggccttggcaccatttctgaggcatgtggttgatcaagcactatatatataaaatctgtgcccacttctgagagcttttaaccagcgtaactctgctgctgtgtgaaacaggttagcgtagaatgtgctcttgagaaaagtgatgatggcaggttagctgaggagtcctaaaggtgggcagtgggaagggcaagcatgctgtgggactccttgctggtccctgtaccatacagaaagcagcacatttcaaaggcatgtggtgatgttgcagaacaattcagagttcttcagaaaatgaaaatggtagactttcaaacctgtcttcatgttaatgcttacttaaaaggcccagtgactaatttgactaactccttgttaaaagatttctcattttaactttggatacaattatactttaatagctgctcacatttaaaatagtttttaatgcattgaaatattaaatatgtgatatgcttttctcattaaaatttctgtctttttatcacttctgtaagtgtggtatttaacacagcgattaactgtggctttaatgccccgtacctatgttttggcagcaattaaagttatagaccatttatctgttcataataattgctgcttccttttaagccattttaccaagtgccgtaaaggttatttttattaataagccaatatttctgcctcaaagaaagggctaatcctttctgaagtttgtcatttaactagcctaagtcatgaatgctttgaaaagtggttctctgtgtatatggacaaaagtttgtcagttaattatttaagaaatgtgttcaacaggtcatgtccaggattttgactttttaaaatcaaattaatttctatgaataaatatttcacctacttgtgtgtatgttcatcacctgtgtgcctggtactgatgtaggtcaaaggagggtgtcaggttcccttgaaatgaattgacaggtaattgggaccagccatgtggggctggaaaccaaacccgtgccctctgaagaacagtaaagtactcttcaccactgaccgagccaacattcccactcgtgattgtatttttaatttgctgatgtagtattttttccttctctctcagtcttcaaaattattatgtaaacttaatgggtcaaaaataattgtttggggcacaaaaaatcattttgaataatttttcttgaatcatttaagtgttgttgcatttatttcctatttgatttgtgtagtagttcactaacttttgctttatctttctttttagttttatttgttttatttttctagacttttaaaatatatttctaggggtactttttaaaaaagtgtgtgctgttttgataaaaacattctaagataaataattttctttctgctgacctggttagtcttgccagtgagtcccacaggaggacacagagaggaagaggagtgtttaaagtcacaccacagcttaggtgccctctgaggctcaggcaaacgggggctaggttgggtcatcttcacagtaagcattggtttcccagccccttgggtggtttgtttgtgctgcccaccttgaggtcccgctgggtgggtgctggagaccctcctgggttgtctgcaaccttggctccatgatgaaattccctgggaagtttaaccgaccttgatccctgaactcttccccaggaggctttgctttagtggtgcagggctttgctgctgtctgaagatctgtaaaatggtttggtgagtctaacacgaaagcaggattcaagactgttgccaccactttttaaaatttttaaccaaatagggaatctgaagctcaaaaggagttagtgacatgtccgcctccagactgacacaatacagactgtaatctttacattgcttaagtgtttgttagtttgttttttaatgaggacatctaagttttttgaaaataaaagtatgtgctctggtgtttctaaggaactctcaaaaatgcctcactgtttggcttagtccaggaaaatgacaagtattatttttttatctgttttaacacaggaaatgaaacatgggcattcatagtaaaacctatagtcttcaccttagatatgaaattcaggaaattaaggaggtagatttagaagagtcatgtgttctatgacctgcccacatcgtctgaaagaatatcaaacaaaggatgaaggcaactgagactctgttaggccaggtcgacatgttagtaattccaaaggagaactgtaatgttcacgttgtgacatgagtcatttgggggacaaagttccatattcctgcggtcagggttactgctttcagcacatatgacatatcagtaacataattgcaaggtagaaactagactggcattttaataatggagttttcagagttatgaaaggggaaatactgagaaaatagtgtagacaaactacatagcccatatatttagaaagaggtgtattgggggtattaagtgagaagaaaggtgcatggtgctttttatttatttctgtctatatttcattactcattaaacacacagatacccaacaacccttgctacagttttgccaggtacctctcagactgcctgtgtatctgcctgtctatctctatttgtctgtctgtctgtctacctatctatctatctatcatgtttaatcagagttgttgtctttcccagactccaatttaccatcccatggacacaggctacgatgaacaattatttgctgaatgcagttactataccttggacctagggcagtggtttgcagagtgtgaagtatagaccagcagaattatcagagatgaagacagctctggggagcttgctggatgaagatattctcagtcccacccaaaagttcagacacacctgtactaaggcggtattctgaagaccgccatgatttctgatgctcatttgcatgagaggatcatcacattttttttcccccatgaaagcctaaaataaagaacaagatggtaaaaagaacatactcatatatgccccaggagcatctacagccaatctcttctctgaggctagtttgttatcgttgtgcgctgggtctaattgcttcaaagagcacttttgttgtcctgactggcttgactacggggattctgtggtctgtgatgcccagctatgggtggatggcattgagtggcttcactccatattcacagcctcagaaggatgtctggagcttccctccacctgtctgttccctcagtaagtttggtttaggacattcacatggttgcaatggactttgtcacagcagagaaggagactcatcaacacagggactttcacgatctctgtttctctctcgtaattgttacttgggctgtttaaaggtgccttgatttaaaggtggagcagtggtctttatctctatataaaagaagcaaaagtaaaattataattaattcatataggcaagagaggagcttgttactactttgtgatttattcaatatatatttgctgatggattacaacttgggatcctttaatgaacagaaatggctttaaggcaaggtgggtagcctttgagaatcataggaagggcatggaggcctctgtgggaagaagtctgacttaccccaccgtccacccacccaccccaccgtccacccacccaccccacacataaacactggcaagtgtctaggggctgtaacatctagctactgctctgcactggggatcagaagtttgcataaactcttgtcactgaaaaggagcactaaagcggagaaagggtcagttctcagtgttgaaagaggaagtcgttcccccacacctaacctcagtcttcaacatctgcttctgactacagacagggggggaggacagacagagttaactctccctttactcagctcttgtcccaaacagtttgatctgtttttattgcggttcgggggtcagatgttcttgttaatacttgggtagctggagaggagaaagttgtagtaattctttatggctttctgagaagttacaatgccacataccaacgttttaaatctgtggatagggtaggatttagtcattcctttatgaaccccaaaggcaataaatgattattaaatccagtgtgcttttgtgttgtttcagagataaatcaaaacaagaaccctgtgaaatggttcattcatttacctagtgcatattttattttgttttaaaattgcagcctacttatctctgtttaagtaataaatgcataagggcagaatccagattgatgtggtatccatgtgatttttaaaaactgcaagtttaggaaaacattaaataggaccttatttctttattcagtataactaaacgtgaaatagtgtttttttttgtttgtttgtttttgtttttgtttttttttgaaaagcaggtgctttgtaatttgaggagatggtgctaatctagctggcctctctgaaagataaaagcctacctgaaaattagaataagcagtagttggcatgggctagctgtgtttgtggcactggaagggagctcagggattaatggcagctgctctcatcctgatacatatgttcaaggaaaacgcccttcgcatcagcttcatgcatacatgagcgtcaattagggatgtctatgcaagagaaatgtgtactgataaaatcagctgttgcccatgtctgaatcacattaaaaattgacatacattacaaggtcaaatcaggtgtacttatgcctatatgttttacatatgcatatcacccatttgtcagcattttcatgggttactgaatttttattgaattggactttataaattagctaattgaacttgtcaaagggaagacgatgaattaagaaaatatcctatagtattcagctagtcaccacaaaactggaagaaaaacaacacaacaagccagctctcttttcagctctaggtggcaagactgctgggaaagtggctggtagggaccttgggtcccagggtatgttcctgagagttcatgaaggcacataatgtctccgcttccttacacaatgaaagagaaaaatggatccgtctgtctcccctctctgagaccttgctgagcattgtttatgagatgctttctttgctgcagcatgtcattggttgcagttggctcacctttgatactatgcagaattctgccacattcggtttctctgtgctgttgatagacattggtcttgggtagtgttatcaatgtgcttgtgtggtttttgtttgtttgttttttgttggttttattttttttgatgaacgcacacatatttatgatggatatccgtctgtctgtctatctatctatctatctatctatctatctatctatctatctatctttctttctttctttctttctatctatctatctatctatctatctatctatctatctatctatctatctatctatctctgagtaagattgctgggctgtggaacatggatgcacatgtatgcattcttgttcaatagaatatacacatattttaaatacatcgtcatatgtgtacatgatgcctgcttctaacaatttgagcacttaaaaaatgagttgtgtctttttaataggctagctcacaagaaagcattttccttttgccaggaaacaatagcagagtaagtgtgacctcagtgcacctggaggctcatccagtccgtgctagtcttcagctgtttagggacattgtgttgaccagtcacagaatttctgagtttacagctgtacgtctatactatgaaaatagaagcaaattacttctgaggttacttctgtctacagctttgaaactaaaagtgtcctgacagaagattgcaaaagaatttgtaaatatctgcaatctctgaaggaatataacttcccagcaaggatttttggatatttgaggtattcagttagcaagtctgacttctggtaagaagttaattaatgtggcactctgttaaaataatgattgttctactaacattgctagaagttttacatcatattcaaaattgatcaaaaacaaaacccacagtaaattcaaatactttggcaacttacaatttaatctccccacaagtgtgtgttttgtgttaaatgcctaatgagttagatgtgtgctttcttacaagtctcactcttcagttctgcacgtgtaccccattgtgaccttttctgacatctaacaggtcggttgccaagttgaaaagtcatgagctgctgtttcatagggaaatagcaaccagttgctagcagggcatacttaatttgggtgtggtggagctgactttgacatttttctttcagctctttctctgaacttgtgtttgtacctaactggattccacgactgtggaagtacaccagagctctgctggacacttgggaacccacccagggcttgcctgtgcccaggactggcactggtggatagaacgggcatcggagagtcttctgtgaggctgaatctctcctcagttaaggcacacattcttcccctgcagcctctagccttgttcttgcagcatgaaagcattctgtagtgacaaagagattataggtcccatgctcacgtgtttgatggagaaataaacaggactcctgtgtcactttcccttatttccattgttgagcatttgagagtcctgtaaataaaagcatctggacccagtggtttatagaagacttcaccagttgctttatattcctagctgtgcttcctgcacggctgactggcggaggcttagttagttttacccttgatttattgctctaagctagctctaccaagaatgtcttcctgcctttcacattctctcttttagctgtaaaatggactggcacctcccttaggatttcttagcagctgatttcaaattctgctactctcttgtctcttttgactcttgtgtgtcccccactccaccataggctacactaacgtctttctcttgattattgtcctccggacaaagtacggtagcagagcttgattgacattttcccaggacatttgttggaaggggtaagcagggacaggggaacttgccaagttccctttattactaagctagaaggaatataatagtgggaacagtcaagtctaggaaagaaagtaggtgtgcatttacaggtgacagttttcatgtatcattgccacatgtcacttgttttccttctttggcaaggctaaggttaggaacagccatactgggtggatcccttgcacttaggcatctgaaatggtaatggaaagtgatggagctgattgagaatttgctccttcctcagaaagctgtaggtgagccacaggaaccccagagcaggaatgcatgccctctgccagtcggagagaagctagacatttcccagtcctttctctgacatcccacaatggtattttatcagaaggttctgaagtatcacccagcagagacttacaggattaaactggggtgtggtgatttggggatcagccatctgatgctggtatttacaaaagtaaaaagtacagactgtcccaggacaaggccttcaagtcctgtggtgagtctctctggcgattgagcaagaggggtgacaaatgaaagttctgtaagccttgcccttgaagtcccaagttgaaactaacacactgtagaacaaccgtgttaccgcccacgggtgatgtgattgggcttctagcctgctggccgtgtcaccaaggggctgatagctgtggagtgaaggagggccaaatgaaacctctcacatatcttcagggtcttagacctgaggctactttatatgcagtcttacaagaagaatgatagaaaatgaaagatttaagtgaaaattgtaaattcttttgacttcctgtctaaccagtgatttttccgatgtcagacttatcgtattaaatccgcgccctgacttagtagctttgaggtggggcctcagactctgcatgtctgtagctctgaactgctggggatattgctggcctgggcacccagtgttgagcagtattgtcagacatttattgaagcaatatccacactgcagtgtttagcgtcccttctttctcccttggtgtacaatggtttctaaatgatgacatatgtcattctctgtggtaagcattagttgtcttattggaagaacactgatgaagctcgaccttggtgaggaaaatttagatgcaacaagcacacttcctgtcctttctggttgcacactagtgcaggcgcatgccagcactacacttccatacaagacaatcaacagccgtctagaaattggagttttgtgctatagagtgacacaagaactgtatataggagacacaaaactcttagtgaaacactacaatactcagctacattctgttttttaaagaacaatctagaccataacttagagagttaggctgggtgtgtacttgagagcttagaagacattccctgcctggagcctctccaagggtacgtgataggctgctcttgtgtgtttgcacttgattgtgttcagccgagtattctattttcagtcatgaagaaaaggatttcttcaccacactagatgtttgtctgttgactcataactggaactgagagaattactgtggtatctgaaatgaagacacatcttttcagaagtatattgggaatggggtggtggtggtgttatctcaggctctttaagatggtgataacaccttgggctgaacgtcttcaaggcagaacacctgctctgtgtgcctctctctgtgtgttactgttttcatctgcttgctttcttggtctgttaactgtagaatgagttctagcagagacacggaggtttgctttgtgttccccctcaaaatccatctacaatctaaaactttagaaagcttcttcaacaaagttggtaggtgtgcataaagatccaagggttccttgtcattaaggtcttagttgtgaaacaatggatggaagtaatttctgcaagtcccttcttagcccctgaccatgcacgcctcactgctggaatcccagtgacatttgcagatgatgctccaagctactgttgggtgagaagatggacaggcctgggtggagagatgactttatttctgttgtgtggtcttcctgctttaccagccttgtcccttcatgcctgtcacttctgctccaaaacctgctgtatcctcagcctcatctactcctgcaagctttttctctttgctgaactgtcagctttcatgtgtcatgttctccctctcttctgccttcctaaccctgtcagaaaggcttcagggcgcagcaggctctccttgacctcctgtagtccagaagcaccctaactgcagcccagtgagtcggagttgtatgttttgctctcccagtagttattagactgtagatcagtcagcagggagactggtagctttcaccctctgtggcagtggtgtagagtagaaacaggctccagcaagttctcaacgaatatctattgaatgaataaagggatccagggtgagtggccttccatgttcatagatcacaatttctaagcatggttcaccagtctgaatgtacagagaactgacatttttctaaggtaagattttagacaaggaagcataagcctgtgttgaggtggggagaatatttattatttattattactattacatttaatatttcctcatagtctagtctctgttcctctcccgttctgccaccctccaacagttcctcatctcattcctcctcgcccatctccaagacgatgtccccacacccccacattcccccacaccccaccaggtctcctcatttcctgggtccccaaatctctcaagggctaggcatgtcttcccttactgaggccagaccaggcagttctccgctgtatatgtgtcaggggcattgggccagctagtgtatgctgcctggttggtggctcagtatctgagagatactgattagttgagactgctggtcttcctatggggtaaacttcctcctcggagtcttccagcctttctctaattcaaccacaggggtcccagtcttcagaccatcgattgggtgcaagtattttcctctcgctcaagtcagctacttgttgggcctctcaaagggctgccatgcttagcttccatctgtaatcacaccacagcatcagtaatagtgtcaggccccggagctgacccctgggataggtccatacttggacccgtcactggacttccttctctccagtctcctctccatttttgtccctgtagttctccaagacagggacaaccctaggtcagagttcctgactttgggatggcaaccccatccctccaattgatgccctgttctttttactggaggtgaacctcacaagttccctcttcccattgttggggaggtgggaggtggggagaccctctagaatgtaccagagacctgggaggtgagagactctcaaggctcaaagggagggagctgggatatgaaactattaactagtgctctgttaaatctgttaagcccttatctctgtgtagtacttggagctttcacccctctcctttagtattaaaatctataagaaatagttaagtatggcatacctacccaagatacacacacacacacacacacacacacacacacacacatatgtgtgtgtgtgtaatatataattggtatatgatcttttcatatttctaagttttaattgaaagattaaagtttttttctcaatatgctgattttcttgtttctgttaaatttttttttttttcattatgatatgagaattttactgatgtgttaaacttatatttctttttttttccattttttattaggtatttcgctcatttacatttgcaatgctataccaaaagtcccccatagccacccaccccctctcccctacccacccactccccttttatggccctggcgttcccctgtactggggcatataaagtttgcgtgtccaatgggcctctctttccagtgatggccaactaggccatcttttgatgcatatgcagctagagtcaagagctccggggtactggttagttcataatgttgttccacctatagggttgcagatccctttagcttctttggtactttctctagctccttcattgggggccatgtgatccatccaatagccgactgtgagcatccacttctatgtttgctaggcccaggcatactctgacaagagacaatttgcaaattcatctggaataacaaaaaacctaggatagcaaaaactcttctcaaggataaaagaacctctggtggaatcaccatgcctgacctaaagctttactacagggcaaatgtgataaaagctgcatggtactggtatagagacagacaagtagaccaatggaatagaattgaagacccagaaatgaacccacacacctatggtcacttgatcttcgacaagggagctaaaaccatccagtggaagaaagacagcattttcaacaattggtgctggcacaactggttgttatcatgtagaagaatgcgaatcgatccatacttatctccttgtactaaggtcaaatctaagtggatcaaggaacttcacataaaaccagagacactgaaacttatagaggagaaagtggggaaaagccttgaagatatgggtacaggggaaaaattcctgaacagaacagcaatggcttgctctgtaagatcgagaattgacaaatgggacctaatgaaactccaaagtttctgcaaggcaaaagacaccgtcaataagacaaaaagaccaccaacagattgggaaaggatctttacctatcctaaatcagataggggactaatatccaacatatataaagaactcaagaaggtggacttcagaaaatcaaataaccccattaaaaaatggggctcagaactgaacaaagaattctcacctgaagaataccgaatggcagagaagcacctgaaaaaatgctcaacatccttaatcatcagggaaatgcaaatcaaaacaaccctgagattccacctcacaccagtcagaatggctaagatcaaaaattcaggtgacagcagatgctggcgtggatgtggagaaagaggaacactcctccattgttggtgggattgcaggcttgtacaaccactctgttaaattttaaatgactatctccagggcagaagtagtgattacttttgctacttaaggtttgaattaaatccagcaagtcttaccatggcaagccatcttcctgaatagtcatctcactaaaattgtctccctgggatagacaggaacgatggtctgtttagcagcattgttagatgtccttttgaaattgttgttgtatagtttgggcacagttgagatctaaaataagtgttctttgaaaagtatgtcgttaatgttggtaagccagggattattaatagtgcttgacttttagactgagaccccttttagactgagcgaatacacctagacaagccaacatctaggctgatgtcttatctaggcttacgtcaaatatggttatgttaatttattgccaggagacacagatttagatggcagctcaattaatggactgttgaaaagtctgggaacattccaatccctgcttcccttttagtcagtgtcaggagctgctctgcctttccccgagtacttgagacttgtagacataagtctgttgtttgtcagggtaagtcagtggcctagcttaaccataggttcacgggtgcttaggaatgctttggaagtgaaaaggtaaaagttgttgacataaggaaaaccagccaaccaaccaaacagtcatacatacatgcatacatgggcctgtgctatttgtagctttagatatccatagggaatcttggagctgtacccctctgcaattagggaagatctttaggccttgtaaattggtagtactgtttgacataagccgactatgagtaactgaaattcacaaccctgaatgcagacaatctgaagaattatgcatgatgacagcatggtaaattatccactatgtgaactatttagaatgtaatgtaagcttatttgtaagttatatgcaatatagacctgactttattcccaagatgtctcactatatacaaacaattttttaatccctccacccccacaattacagaactacaatactctttgtcagaagcctcatgagcaagagatgctatagaaacagtgaaaatctaagacttatactaggtatggttttcccaatgcagtcatagtacactgtttagcaaaccattccaaactcggtggtgtgatttaacctcagttatgcaagttactgtgtgttctggatagttaatcttcacgtcctgctggctggggcgttggttcagctggaagatccactgggaagttatgcataacatgcagtgctgctctgctgctgggggccgatggaaacatctctatacacacttgcttaggcttcctcccaatgaagcccgggagcacgtgcagagatataggtaaaacttggcatctcataagatcccctctcacccatgtcacttctgagcctgaagggtgctaaagcagagcaggccagaaggtgctttagatagaaaggggggaacggtttacaccccgtgatgagaagagtgacagaatcatctttggccatctctaacctctgctgatcttctaagttaagtcctgttacaatgtgtctataaagacttgaggaaaccatggcttacggaggataagacagtgccctgcaccatacagttgctaagtggtttaagcttaatgctagctgtggctttgatgcccgcagagaggttttaatgactgtggtgagctgacagaaaacactacctggatctttccttatattccacagccaatagctgagggtagttttattgacttgaggaattagcccatttcagtcagactggatgacattttttgagaagctatcatgtgctccctctgctgcctctccagatctgaatatttcataattgttgggaaaggttagaggcaaaattctgacattgtcctgtcctgccctcattatatatattagtctatttccttaccaagagcagatatatcctttgaaactggatgttcccagtgggcaccctctgttctgctacagcctacagttttcatgtggtttcaatattctcatgtttactattcattaacatgaaacacagatttttagattgacccttttttcctgttgttcagtggtttttgttgttttgagagcagtcattactcatggatattctttttgttgaaaaaggataaacaaaagaaatgtcagagatgacaacatttgtggagaacaaagtaaaaatgaaggcctctagatgagctaatgacaggttttatgcttacaataacttgagttttctgtatttgattcctggtttcagggcatctgtctttaatccacacatgttggggagaggggagtctgtaaattgaaaatatggcggcagcattctccttgcactttagcacggtttgtaaagttcactcaccttaggggctcttcagggcagacttctctaggtacctcctgatcacaagaaaatgttaaccctcccactgcctgttacggagcctttgaacatgttctacaactgccttactcacacgtgttttggatgagagatgtttcacagaagacccatctctagaatctacagtgaccagcactgtgctgtccccattatatgctggtattcttttaactggctgtgtcctttgagatatcgattccacatattgagggatcggccatacctctcagggcaggagaagttacacctggaaggcccccatggttagaaacctgtgtccattaggttcataacgtttgcagcttttctttcgttgttcagaggagcatcaactcctaagaactggtgggttactgtaggtgttttcctcggtttctttgcccttttatttttcccctggaaaaggaataactggcagagatatccttgcggagttcctgtgtgataatgccgcttgaaactgttttcatatcttccatcttgtaaatggaagaaaagtatggtcagcagcgttgtctgctctcaagtagctgtatctttgttgttaaggtatgccgaaatgcattgtgatgtcctcatttgacaaacttcacaaaactcagaggcctttcaaaagttcctaagagtgtcttggctaactttttagagcctgttatgaaagtaggagataaagctatcaaagcgacttgagaacatattctttctcgaccgtttttagatacgggcttaagtgtctctccgttatactttgtgctttttattttaagagtatggatgtgagaacccttctttggtggtaaggatctaggaaaacatacgtgtaaggtttgggaaaactttggagggaaatggtgagtgcagcccttcccagagattcctctgtcagtgttctcctgagtagtttatggcgagtgtagcagaaaagctttttcatgtgaaagccaaagctggtgttgccagtggggctctacagatggtggagcctgtgctgggactggaaatctatttattcttctacaagcacatttggcccttgcctttaaaaaaaataaaaaaaagagagagatcaatgtaatggcgtttgagtgatgtttttgttccttgttgaaaataagaatatttaaagattataaagaagtagaaaaaccaactgtagtgaatctgcttctcagagatgactgctgtcaatatttttcttgtatcctactattcactgtttatgaattatctatcacagatgaggaaatattaatatagttttttattaatttggcttttgtcatctcgtttttctttcttccattcttccattttctcccagtgttatgattgacgcacatacctggttatgcctaccatgagtaggcctgggtgtggaatggtgaattagtaccatttttggttatcactcatagggcagctgtggttgatacttcagggatggcccaaatctcgtgtctttccattcgtctatgttgcagaatcagtagtggggtgagctggcccttccaacttctgcatgtcctttgtctttcccttgctccattccaggggaacaatgtggagatgagacagcaggctaccgaagggaaaaacttcccgatttccaaatgggaaggaggttctgaggaattgttagtgtgatagggtactggatgcttccccaggaaacaggacagatgtgtttccgctgctgctgtccccgcagactgcatgggagagtggcagctctggtttcaattagcttggtgacattctgctttgccattcatgaagacagaagtcacaatgagaaagcatgagacaacctccgaacttacagagcagtttaacgtttttatgatttagtagagtctaagattgagccctatattattttaattttgctagaacaatttttggtaattttacaaataatgtttatcaaggtttggaagcattatttataaaatttattggtatgtgtctgtttgactgtgtttctctctgtgtgtgtgatcacatataacatttctatctggttttgggaactgttttgagtggtagcaaatctttccttataattttaaaatattttatgatctcttcatagtcaaatgtgtgtgtatgatgtatgtatatatatatcaccaacaaaaacttttgtggtaaaaagtacactgcaatatgtacaatatgcttagaatgtgccttcactacccttcagggaagaccatttaggggtcaggtaaaatggagccttcacagtcagttgatcacaaggagaaaggccagggaaaacatgactcaagcatattttgatatagaaccggtgcagagaagtcaacagaaagaggcacggggagactgtgcctgggggaatgcatagagacttggtggctggcttgggacaaactcagcgagagaaattaggaaaggcagctggccctcgggtcagtagatgttctagaaaatactggaaaattatacagcatatttagttaagtgaaaacaaaagggaaaccatcaaaaccattaaaacaaacaaacaaataaataaaactagtaagctcaagaattttccaagtaaacagaaactaagattttttttctgatgtgtctgtgataaggttttgttatgtcatgaagcaaactatgtattactttttatgtttttaaaattaaactggattagaagcaataaaacatggacatcatataaatagctgctgcactgcagggttgacatttgccttatgcttttaatggtaggttactttgggtcataagtaacagggaggatctagtttattaaaactgtttactttatttttatttgtttgtgtgtgtgtgtctgtgcgcgcgtgcgcgcgagtgtggacacacatgccatgtgtgtagaggtcagtggatgatctgcagttgatcctcctcttctgccatgtgggagcaggggatgaagcttaggttctcaggcttggcctcatccatctctgcccgctgagccttcgctactccacgttcactattctatttcaactgctcttcttctgaagtcaagtttgatttgttttttgatacatgttacccaggtcatgcacctatacttgagtttctagtatttcttttcttttctttttttttttaatgtgccagtgaccgggctatggcagctgccgagaagaaacagcccccatgcataaatcaaaggatttctcttgcccattgtatccactagaaagctgtacctacacaacagcctccagcaaccacattgcttttcctgcaataattaatagtctggtgtatattttaaagatttattacagctgaactctgtcacagatgaggtttttatcaaaagatgcctaatatttaagaaaagaagggttgtttatgttactggggtaagattataaagctattagacaaaataaaggtgggagtcataatataatgctttagtagattgtaatggaaaaatttccccataaaaccatttataggaatcaacaaatataccttgatcatcctgctttggtattactgtgaaggtaatatggccagcattaaagaaacatttaggagctttatggaatatgtaagttaagatttaatatagtccttctctttgtggacagtgctggtgcactcctagaacatttcaaagcctatgagaacaactctgttcaaccccagagccaccacacccagcctaattcttctccctccttgagcccgttgatcacagacagcattccgcacctctctgggaaccttcaattcctttctcagatgattgctctcatggggttctgggtctctcttccttcatttctcctgtattttcatcatctttggagatccccaaacccttttaggtgtagttaactgcctctttgagtcctcggtccttaaaccaagcctggatatgatagacagtcacagagatctgtagagtaaataattgaatgtgtgttcagctgcttgtcaattgttcctgagtatggagtgtgtactacagtcttcctaaagtgtgcacaatactttatggctgttggttgtgtagatgaaatctatattacaaagggaagaaaagcagcccacctcaatgactgtaatttctttattgatcataacttctccttatgactcctctagacctttggctccatacctcacttactcattagaacatctcaaggagcagtcattttaggtaacattccaggatgaggaaactgatttcaaaaggcttagtaacgtaagacttcatagcagagtaaggatatggacccagtaataacagactacatagctaaactctaatgtagggtatttaaatgactaccccacatatttgaatgtgaatgtcttagaaactattctaaggatattagttgtgaacatagcgtaatttcatatttgagtgttaaggatgtgatggtaaattgtccatttgtaattcacccatctgtttttctcatgggctgaatctttatttttatcggctttgcccgaatggaagcttgtatatagcagatgcaagaagaagatatgtagggataaaagaatgcttactatggtctctgctttgggctacaaatttgagcttggcttttgttctagcagtcttctgggttgagttaatatttaatttctttttaaaatttataatcaactttcatatttaatttgttaacattttaattagcccacaaacgaatgaaatttatcatagcatttttctacttatcgctatactttctttttattcccactctcctctgtatcttcctcccccctttttgctggctttctttctctccccaagttaaccatcactctacagtttactgggaagctagctgatacaggtacattgcagagggcctctgctccagtctctttctggccctcctcctgacttgtctgtggcttgaagtaaatactgagtcttcagtagtaaatcgttgctgagctcttccacttctttcttctgatgtttcacttccatattggacttttaaggggaatcttctttgttagtccccttagaggtatggcaggtctcagtatttggacagagtcgcggagtaataatcagtctttaagactgtcagcctcttcctaataatagactgactgttttcagatgggagaaatgaaaggcaaggtttccaccagccaagtctcctcactcccctaggaatcagagtgccccaggtcaacagcaatccagagcactctatgtcacaaatacaatagaaatggttcttagctggatgtgagtttccttttaagtgcctctgcttatatatgtcatgtggttctttggttttatgttagattgtttacgtaaagagctagatacacatgctctagctttcaagtgtgagaaatgaattattaatagttttggataaaatacctgccctgtcttctacccaaagcagaacattctcatgaagtttggacttcactaaataaatatcttttaatatttttgattaattcagtatttctgcctttttatttcctcctccatttgtgacagctgtttcttcaatgtaggaaaccagcatcgtgcaatctcattagatacatgttttgtgcacctctcatatttagtggatgccaccaatgaaaatttgaggttattaattcgcttttcaacatttactcatgacgtcatagtggccataattaaagtggaccagaacacggtgaagtgtcatgaattattgtaatgcttttttcatgctaaagtttttttgtaccaaagttcactaaaagtagtcttatatattcctgtatcaaactatttattctttgtcctttatgatgttggctagaacaagctaaactacttagatttatcataatcagtgaagtgccttcagtttaagtcatttattcattcttgtacaaccacattccacaaccttgcttgattgtcaaagaaattgattcacaccattgacagaagatacagggttataaactgaagctaaaacagaagagtgtcggggcatcatcggtgatggccttgacatgtggatgaattatagttataagattgttgagtcttggttagcacaatttttttttttttttggttgtggttggaaggagacttttagtgatacaaactagtaattagtaatcatgaaagtccttgttaattagtcatcatttcctatcatatggtggcaagtcagacggctttcagaagggctgtctcactgtggaatgattgtatgataggaacaagtaccccagctgcagacaacgtgttctgtgaggctttctgtcttcctttgtacttaaacggtgagaaataatgcaattttgtattttgaaggttgagtgttgttaaaagcagtgtgtctagaatacagagtttgttagagaattatataaagcatgtacttcatagaaaagtacagatatgtcacagtctttattgtgacattaaatttataagataatagatacataattcactatcttaacatgaactataaccttcataagtcagtgtcgttggcaatgatattccaagaattcacatatatgtgtggtgtgtactagggtgtgtgtttaaatatattatgtcagaattctaaattctggcctatatgaaaattaaaataacatgatatcaatgactccaaatagttttaataatatgaattggggtttctttaaaaaatacatgtcaagtgggaggtgagagactccctggactcataggggaggaacctttgatgagttgccagacagtggggagagggaacatgtggagcccacttccagtgggaagacgggatatttgtggggttgccatcccacagtcacacctctcacccataattgttcctgtctgaaagaattacagggatggaaatggagaggagcctgaggaaaagaagatccagtgacaggcccaaagtgggatccagctcaaggggaggtcccagggcctgacactattactgaggctatggaatgctgacaaaaagggacctatcatgactgccctccaagggacccaacaagcagctgaaagagtcagatgcagatatttgcacccaaccaatggacagaagctgctgacccctgttgttgagttaggcaagactgaaagaagctgaggagaagggcgattctgtaggaggaccagcagtcttggttaatctagacaaccactttcaaacactggatcaccaaacagacagcatataccagcaaatatgcggcccctaacacacatagagtagaggacttccaggtctgtgttcattcagagatgaaccacctaaccctcaagagactggagtccccagggagtttagaggtcaggtggggtggagagtgggggcatccacgtggagatggggtggggtggggaggaggtctgggatgtggagcagccagagagtggatagggaggggcggggaatggaatatggagtataaaaaatgaattataaataaaataaaattaaaaaattacaggtcaaatatatatatatttgtcaggctgctttgcatggcctgaggtcatccatttgaaggtaaaagaactgtacacacaaagaaagagccactggatatacatacatatatatgtgtattagtgactcttagagcctctagattataaatttaaaaactcttgttatttctgttttaaagttgaatgtctactaagtcagttgtccgtgggcaagctgaatctctccatctttcatctcctggggctcagagagccgagattactggtaatcactgactttatgcttcagacgtatacgtcgcaaggcaaaatgagaaacatttggatatgcttagagaacaaagacacaaggggatggaggcaagcagtttagaaaataaggaacagttggctaatcttaattataaccatattcatttttttttctttcttatgtgtcaattggaagtttgttcgaaaactaaccctcttacctgataatgggacttaattcattgcaggttttctgcggtgactttatgttttgtctaagcataaatcctgaagcgcttctacagttgagggaacccacactttgttgcttggatggagaacagtttgctatcatttttatctggatgggacagccaggtcaatcttaacgattcagctcagtggcagattcgtgcttggatcaggttgtgccgagcatcaacgcagatgtatttcagagaatgaagatttatctgtgtacactgacagtaaagctgcagattggtaacttctgactccttagagatgaaattgcgttgattaagtatgttaggagactactggatattttccttaaattgaaagatattctgacaacacatttatccttgattgctttctctttacttttactctcctgtttcttgagtatcttggctcccccccccttcatcttatctttttttgtatttttttattagatattttctttatttacatttcaaatgctatcccaaaagtcccctctaccctcccctcaccctgctcccctaccctcccactcccacttcttggccctgtcattcccctgtactgaggcatataaagtttgcaagaccaatgggcctctcttcccagtgatggccgactaggccatcttctgatacatatgcagctagagacacgagctctgggggtactggttagttcatattgttgttccacctatagggttgcagaccccttcagctccttgggtactttctctagctcctccattgggggccctgtgttccatccaatagatgaccgtgagcatacacttctgtatttgcagctacttatttttaaacatgttttaagaagactaggatcttcgtctttaatcacagatacatagtacaccatgtcttctaagcatcttttccctactgtcattaagtatagatacgggagaaaaaaaatggttaaagcaacacgaattttagtggcaaagacattgctaaaatagaaagttttatatatagcaaattaaattgctctatatttcctgtgtattttcttgaggcagttgctcttaccctagtccccaacacacatatgcacacaaaatggcttaagcctcaaaacagtaagtgtgtgtatgtggtggtggtggtggtggggtgagtttgggttggtgattgtgagtttaaaaaaagtggtaaagtcaattcaaagttaaaacttagattcctttttttttttttttagcattctgtgtttcctttgcttcgtcattatctagcactagtttattctacaacatagtttatgctgtatacttcagaactagtaagaactattactggtgacagtgtgacttgtgccccgtgaagcacacatccccagagcatccggattagaatatgggtgcctgctgttccttcctaccttaagcagctctcaccctcttgtcactttatccctctgagacttttcgttcaattcctgttggctctccttcccatatagcagtctgcctaatgagggacacaagttagaatgtcccaggaaagtttggaagtgcttgcttgcaaaccccatcattagggcatttagtttgtagctagaagaggtcagtgaacttgggaagacctcgtctcactgattggctctctcttcatgtcaagtccaaactaaatgttttttcaccctatttcccatcacatcttctttccctctgctgtgcttcagtgacccaaagtgagaagctttgcttctaatactttctgggccctttctgctcctccccagcctcttctttccactttgggacactcgtgtgccatgcaattacatgactttctcaactctcctcttttgtcaaaatttcccttgcttttccggatagaagtagcactgtgtcttggcatttatgtctgattatgcttcccatgggtttctctttctcattaaacagtgagcttaatgaatgaaattctgtgattttccttgctcatgtttctgttaaataatcacacggataaaggagaaaataagagctgttaagaatgtatgtgaacagtgaacattaatttagatggaatctcagagtggcattaacccgtttttaggctcatgaatgtctactaagactcaagtgtatatatgctgaattttttaaaaatatagattcccattaaagattccatgcatatatttacttccctttctcttttctcttgtacttgacagacggaatctcacaaagctgtcccttatcttcagtcacatgctggcagaaatcaaggcgatctttcccaatggccagttccagggagataacttccggatcaccaaagcagatgctgctgagttctggaggaagttttttggagacaagtaagtagaaattgctttcatagtctgcatccatctttccagagtcacctaattgagtgtatagagaacgtacttggtaatttttataagatttgatggggtttttgttttgttttgttttgttttgtttgttgaaaaaggacatttttcctacttaagtgttttaccactgagctatgcctcaaaccttgaaatgtatttagaataatggctcctggtatagccaacaaaactatttgttaataatggaacatataaattatgttgttagagtacatgtcagattagacagaatttatattctgagagaatttattgagtcatttagctccaagaagcagagacacataaaataatttctgtatgtaatttcttatcacttaatactcatctaggatatatatatatatatatatatatatatatatatatatatatatatacacacacacacatatatataattgaaaggtatagggaaatatttactttaatgagcataaataagaccgtggagataattcagtggtaagagcttgctgtgctagtagggacccagagcttgatctcctagtatccacataactgttggtgtgcatggcggctcactgtaacaccagcacactgcagctcacaaatggcattcctgaagtaagctgtcaagctagactaactgaggtggtgagcccagggtgctatgaaagatcttcctcacataaggtgaagggagagcaagtgggtaagacacactctgtctacctcagccttcctcaggtatacatccacacatgcatccataggtaccaaaggagcgtgttgagcttagagaacttaaaaacgtatcaaagcaaaactgaggtgtaagaagtcccctagatcactcagttaaacctgtgtgtattgtcccaaaccccactctgtttaaagaaaggctacctgccagtgtcatcaggaagctgccaagcgaagactagaagaagatgtttcttttttcttttttaatatttttactaggtattttcctcatttacattttcaatgctatcctaaaagtcccccataccttcccccaatcccctaaccacccactcccactatttggccctggcgttcccctgtactggggcatataaagtttgcaagtccaatgggcctctctttccagtgatggccgactaggccatcttttgatacatatgcagctagagtcaagagctctggggtactggttagttcataatgttgttccacctatagggttatagatccctttagctccttgggtactttctctagctcctccattgggggccctgtgatccatccaatagctgactgtgagcatccacttctgtgtttgctaggccccagcatagtctcacaagagagagctctttctaggtcctttcagcaaaatcttgctagtgtgtgcaatggtgtcagcgtttggaagctgattatgggatggattcccagatatggcacgctctagatggtccatcctttcgtcacagctccacactttgtctctgtaactccttctatgggtgttttgttcccaattctaagaaggggcaaatgtttctaatgagcacttcttactcagatacagatggccatgagcagggtgtgtgttggggcatgatagtctgaatccatcacaatttatttaacatttggaaaactttgtgcaatgtggcccaggtgtcaacaaaggaggcatatgcttcttcagtgacgtcataggttccctttacaaagagcgccttgggatgctctctgtagagtatgctgcccagtagggaggaagactggtggcttcctcatggagaaaatggggttaatgcctctgtctgccacataaattgtaaagtcagacatgtaaagtgtgggctgagctttgagctgctcagtgctctcagattagtgagtgaagcatcgctttaatctgtgtcttttcctttctatcatgaaatgcttggtttatatagcttctaccccaactagaatataaatagagcaatgtttttaattggcatacaatatttgggtgccagaactacattttggcttgctgtttgagaagcggtttgctacgtagcttaggctagcctgaaatttaaggttattctcaggctgccgcccacgtgccaggatcactgttgccaggatccactccttgtttggcttgaaatgaatattaaatcctatttttcacttccaatattaaaatggactttttgaaatgaaagggaacaataccattttattccagtagtatgaacattctgggttctagaaatccagctattcataacatttctatatccaattaaagtgaaggattaatagtttcatcctcatctggtaatgggaactacagaagcagagagtatactcatgaaatatgtatgagtctgcaaagcagagaggcagattccggaagactgccagcctcctgtattaacactgagaacccagagcatccatggtgactttcaaaatcacgtttctctctgaaaatgtatagaacaggttgttcacagaaattcattttgaaaactgaaaactacgttttgttataaagtgctttgttagcaggttcttaagaaacgacagctttgctcaattgtttttagaattatatttactttgttaaatatcacagcacagtgaattatgaatttttgacactttgggttttctctgcttagctacagacaacaagggcctgttattgtatagaactgttatgtcaggaagtcacttaacctacaggtcaagtactccccctacctcctcagccctcccaccgcttgctgagtctacagactgaggaaggctgtaaattgcctttaacgttttgttacttttaggatgaacattcagttccaggctactgccagaatgtatacagaaatgtataactagagttctaaaatgagcaacacctttgggagatgtttggagaagcgctcttcactgttggtttttctgtcgtccctgtgctttttgacttcgtgaacagtgctgactagtctaccttcccactggttgagttctttctctttcttctgccccaaattcttcagacttacttgattctcatcttaaagaattcctgttgcttatccccgataatgatgataagtgaaaacgattttatttaatctaccggtgactttaaacttcagaatagtattgttttcaaaaacagacccataggaggttgtctctacaaacagtcagattatcattttataaattgttttgtttgctgcttaatgactgttattgtgacttacttccctgaagggatagtcatttctaacaaagcatttagaatgaattaaaatagaaaacaaaccattgttcataagatgttatgatactcataaatataatttcaggtcagcccttatgaaagcagggaatagaaaaccagctttcaaaccagagccctgttctctgcctgcgtagcagccattagccccatctgctgagagccttgggaacacagaatgcccatgacaaggggaatagaagagcctgcctgtgccagattattaggggactccatttactatttcaaaagttcagtcttatctttacttcctattattctatccaccaggagataatagcaatatgtagtaaaagagcattattgaagaaatctgtcaaagtaagttgtacaaatcttcaaattttgtaataatgtttataatccagaaaagaaagtaccgttaatccagaaacattttcagtctggcacatttcctaactcacacaagtatataattgcctaagaaacagggcaggagggtaagtaaggcaggggagaggaggtggaagggaatcgagggatgggtggaggaggacaagtgggagggttgggaagagggatgaaggggctaccatgcccacactctagaagttctttttctaagcaggaccagtaacaattggaattgcagggatggttttcaagcaaattattattcaatgaaagctgatgggctatttaattctcatggctgtcttcttctaattcatccattaccagttttattcttttttgttggttattttatttattttcatttcaaatgttattcccccttcctgttttcttctccacaacatcccctattgcatcctccttccccctgcctctatgagggtactaccccacccacccacccacccactcctgcctcattcccctaatgtggggcatcaagtctccacaggacgaagggcctcccttcctaaggacgcagataaggcaaccttctgctgcatatgcagctggagccatgggtccctctgtgtgtgctctttggttggtggtttattccctgggacctctcaggggtctggttggttgatgcaaatccctttagcttctttagtccttcccctgactcctccattggggtccctgtactcagtctgatgattggctgaggtcagttttactcttcaagttgaagtttagacactccccggcttgctgtaacagcctttatactggagcctctgtcttcaatcacagcttctgagatcagtgcaacctgtggaaagcagaagctgtccatcattctagacttctggcagaactgctttcagggatattggctctgagatcatgtcaagcctttggccttaagaaaggttgatctctctctctctctctctctctctctctctctctctctctctctctctctctctctctctctctctctctctctctctgcttcaccctcctccaaaaggccacacccaggtcatctatattccagtgtttccccttgctctcttctgtcttcacgcttcagtctgttacctttccttccactacctgggtgtctcatcattgtgccctgccactttggagggtccctgacagactgtctgaagtgctcatccacattcttattgagccaaacacccaggttcccatccattcttctagcttacatggtactgtgatatgttcctgtttcccagctgaggaatttccaagagacaggacagtctatttgaagacagggactgtctcatttagctttgtttttgtgggcctggcgtatgtcttagaatgtatgggcactagtatttattcacaatctgcatgcatagttggatggacagtgtctgttcttggttctgtttgtaatgactccatcattgtttctctgtcttttcttttttttctttttttcttttctttttttttcttttcttttctttctttctttctttctttttttttttttttttttgttgtctcttttcattctatagtttttatacatttctacaactttgccccagaagtttactttctggttacttctcagtcacttaccagcttccacacaattaactacctgactctctgtactcttgctaatatttctgagtgcacatagttgagtatgattttacatgggcttgtcctgcactgttaatttttttacagttatgtcaaattctgtgatgtttctttttggaatgctagttctgttttcattgtcttctgtaaaatgcttctccactttgttttatgtatatgtgtaatttgcctgaagttatatctgtgctttatatacatgtattacctgccggggccagaaaaaggcattggatcccctgtgactggagtcacaatcgattgtgtggggtcctaggaatcaaatctgggtcctctgcaagagtagccagtgctcttaaacattcaggtttctgtccaagtccatttccaatacaatctttacacttttttccaagtggttttcgtgctaaggtagcctataggactatgcactatagagacaccctgttgttcttgagcacacacgtgagtatatgagaccactttcctactctaggttctcttccttggctgacactccggtaacttctgttcgtgggactcttccagaggcattagcacttgtagcttctcatctttgctccaattagccctatcccttaaagatagtacttttgctcagactatggaactatcctcatagcagtgagactatggaacctgaagaggtcatctcctgtagccaggcaatggccctagtggagtgatagagacaacaacccacccagaaaactttcaatggaaaaaatctatcctgtctacaagaaaggcagggctaaagatggagcagaaattgagggaatgacctacacgggtaggtgctgattattcctaattggttcttgattgtgtcaataaagaaggctagagctaattgcttggtgaagggtaaaggtgggacttctgggtcccagaaggaatagaagagatgcagggaaggaagttgcttttggcagctatacattagaaggagcagaaagccagtcatgtaaggccttagtgcacttagggcctgcagcctctgcagcaggtgggggccaaggagttgtgtgggagctagctgttagctgataacattggcaaaggatagtctttgcccagcaattgtgttatctggtaagttttatattaaaaaaaaaagatactgtaatctcaggaataaaattctcttgaatctcttcaagttcttccatctcaggacccaaccctcccctaaatgttacaatcaggtccactgattttgaataagcccttcctggcctcctgcatttactatttttaatattttatttaaaatcgtttggataattatcatcttctcagtccgtgtctaagctttatgaactggggttcactgctttgtgtctgtgcatttcagcagagtgtgtgctgtgtgctttcatgaacattggatttcatctcagaaggataggggaagaagaggtgcagggcctcttagtccacacacaatagagatggagacacagctcctacctgggatgggaggaaactagactggccctgaggccctgccgcactcgcccttcactgcagcctctcctcactctgtcactgggcacactccttggcctgccagtggatccctgtccttttgtctaaagtgtgtgcctgtgagacggtgatataatctcttgtctggtgttgctgtggaaattcaacacgataaaagctgcctataaagagggaaatagtgtctggctcataatgggccaactgtattgtgaagtaattacgtagtttgggtctttgatcttactccaaatatcatctatgtatttgctcattctagaattaatacagttaatctttgactttgatggaacttccacacctggcaatggaaggcaaaccaaaaggaattaaaaataaaacttgagttgtcccaagatcatgtctatccctatataaaagtgagttaaaggtccatgattttgctgaccccggggaaaatggcctttttagagctcagttattgcttctgcctttgatttcccgagcaagtgctgtagactctctttggtttcttgtgttcactgttcacttttaataagaaacaaggaaaattatgtcttttcctctccattgagtaagatatatgttctaggctgttaattagttctttttctccattatggaaaagacaatctaattctctctaattaatagagagagtgcacagttgaaactgagtatacttatagtgaaactggacagcaggttcactagaaaaaaataactaagaaatgaaataagctcaaaaataatttcttttgaaccagctcccaattttgtctgtttaagcaaattatagtattttatctcaataaaataatgtagcttaaatagaaattgaaattttttgctagtgttggactcattatctaaaatgcaaaagtacaaaattgtgacatactaattataagcattcttttcagattgggaatgacagaaaataaaaaggtgataaatgcttaaagttctcatttgacgttaggaagtgcctactgaaaaccggaattgtatgcttcattactgacttattaccaaggactttttcagcacaggatattactcaattcatctttatcctatattcatgtttatataaattatctatctccattactatactaatgtatgtattcacaatatgcaaaacacacataaagtgatacattatactataacattttaaaactatatacagggggctggagtgatggctcagaggttaacaggtgtagctgtccttccagaggtcctaagttcaattcctagcaactgcatggtggttcataaccacatataatgaaatctggtgccttctggctgcaggcatacatgcagacagacactgcatataaaacaataagtcacacacacacaatgtaagaataatgttgatatttgcttcacatcctggcaagcatgtgtgcatacctctagtatctaagactaccacctccacatgcacttcatttaaatacagaaaatggtaaggtccatataacttctttgtacatgcccactcaatattttgttcatctccactcctttaacctctctttgtttcccacctctctcctgctaccctttctatcctcaactctcacctctgctttcataatgcacctcacacacactcactctcatacacacagacactttcattctctctctctctctctctctctctctctctctctctctctctcactcacacacacacacacacacactcactttaaaaaataaaatataaggcgagaagtagaaacaaggtggagtaggggctggtgggagaagtgtgtgatgtggaccatggtaaaagctacagtaatgggccctgctcctttgtgagacaaaggtgagtgcaaagggttgcaactgagctgccttctgtcatttatctagctttgccttccctccttccttgacctctcctcccctccctttctttcccatcctccctccttatctccctccatgtgtcttcccctccctcactctcagccccatcttccctccctttctctgcctccacacttcctcccctccccactcttagtcccaacttcccttcctctctctctctgcctccaaacattcccctccccctctcagtcccagattccctccctgtctccctgcctcctgtatccccctccacctttccctcatttttgtgtatgcactgctcaatgagaaaactgcataaatgacatcctggaggtcattaatgttttctgaatgagttctcaatattatgataatcactaaaactcaaaatggtgtctctaaactgtttttgaagtatagtttagaaaaatccttgtgtaacctctgtttaaaacaaaaacccaaaagagaatgagaaattatgtaattaaattttactttgaaaaaatttaaataacccaaatcactccttcctgtaaaaccccaaaatccataattttcttttccataattcttgcctactaattagtttggagttaattcaataaagaacgtgtttaagattgtgcatcctcattctcagaaattcttgtatgtttttactttttgaaccattaatcttaacaaagcttgaatgctaatatttttaaagggttttctataatagtttataatctcattgtaatattaaacatatttcaaaacatttggaataaattacaacgtacttaaaaagagacctcatataatattcttccaagacaagctgtttctctttgaagcagagatccagtctgttgagccctgagaacctttgtactgttctccctctgtcctggatgtctcttccctggctgcaggactggagagagaaagtctgggaagctggagattggaagggtaggttgcacaggcggcattctaccccacacccccagagatgattagattggtgtgtttattgcccattggaaaagatctgggttcgttaagtgccaggttctgtatcactgacaatcacacagtgcatgtggagccactgggcatcttcatagagagaatacaggctcagggaacacagggaagacatgggtgatgctctcaccactgtcttgctgtgaataatacacatctttttttgctaacccatgaaactgaaaactaattttctagaagcttggaagctgtgtatgtaccccacactccacaacaccctagaatcactttctgctggcaggcaaactaattgacttaatagcaaagtaattctttttttttcccctacagtcaacatatagaaatgtgttactgactgctaaatattcattactgactgctgaatattcattttgtattttgaatgttgattctcactgtgaagaacagtaatggatttccctgcttagttccagttctgctcttactcttcagtaataatgtagtgtttctacagaacattaagcatgacctgtgcgtccagctactggagagagtgaggcaggaggattccaaaatgaaggtgtgactgggctacacagacagttcatgtccagtcttcggtacttagtgagaccttctctgaaaatacagagtaaaaacaatgttgaggacatagctcatggtgtgaatggccctgggttgatagagagggagggaagagggagggagtattgggggggagagctcagtgatttctgactgtagtagaaggacattttgctagacctaaatatgtgcagtttctccagtcaggggcttagaatattgctggatgcttatttcctttggttttagactcagatgtctaagaggcttcactcactcttatctgacttaattgggcaatattaagagattcaagaggaattttgtttttattactggcagagtgggtgtgtgttgtgtgtgtgcacacgtgcacttgcatgcatgtgtttgtaacaatgaggtcttatttttgaaaggaagatcattttcaaacaaacttctgtggtatgatttcccatttttcatgtgcacattatttcaattttaagtaatctgattgtagcctatcaaaggcagcttgctttaaacatcaacagttgcatcccaggcaccttccagatgttaatgaactttctgagaaaaggcaatgaagactagctgtactttaggaagatgtgagtaaatactcaacactttaagaccagagtctgctcttctatggttcatgactatgacatggaaaaacgacaacaggaattttaattcaattttatatgtgatgtatttgcagcttctctgcctagtcctttctaccagtaaaccatatttccaaagtgaaagagtaagcataagcattgcagtggtgactggggattcccttagttagttgttactctcctgtttaataaaaaacagttaagaaactggacttggaagcatggtgaccattttcttagagcttgagagaaaaccagtagggcaggcaagctggaaatctcagtatgtgccaggaggagataactgtggactaggaaggcaaagacccatgccttcaccctcagggtccaagaagattgcggtgcagatatggaggtcagcaggcagtctatggcagaatgcaatggggcaagtgcatcccagagagaataaaagctatccatcaggtcatgttgcgctcaccttgtccagcaagaaaaacgcaacacggttggattcttctcaacagccttctttatttcaggaacacctctatgctatgggaaccccggaaacccagggaggactgcttatatacaccccagcactgggaagagctatgtgtcctcccgggattggtcagtctgctggcactttaatttctatgcgcccgctcgggaggggttggcgccagattcgggccagcgcctgcgcagtggcgttgtttacagtgatggtgtactggaggccggcgccatcttttaggcgcccaggctgcctacaaggtcatagaaagatatcttatggagagagaggaaagaacaagagtggtttaaaatgtgagagcagagttatgtggacatatcacagtgttattgtgaaaatcagtgacagggagtgagtgaaaacatttccttatctgttcctgcaagcataaaactctcaatgtagatctcagactggacatgaggtaattggtcaatccatagagacaccctgataatgctatagcaaactggcacaggcttctttgaataggaaaaatgtgtatcacaaacgctttcggtgtttgtttgtttgtttgatttttgtggaagttgagaagtggttagatctagttctgaacatctctgggcaccatggttgtttcctgtgaaatatgagtagtcctatagcatgtgcatgaccccagtgagcctcctctgcccctcctgccctgctgcaaaacaattgttttttccttagcgatggagcagtggatcaatggccgcccgataacaatctattttcacatcctccaagaaatgcagtcattacaaaaaagattggatttaagtaataactatttacaaaactgtcaacagactcaggaatccgagttctaatggtctgcatccataataaaaacagaaaatcagattctccagcctcctgagaaccccagtccattgctgagtgaagctagccttcagctcggatgttctgacacagagtatctgctgggttaggtaaatacgttgaagaattcaacaaaaaatttaaaataagaataaggtaaatacatgtaggacagattttctcttcaaagctgagatgacattgcatatgaatgaactacaatcaattttatcaacagccaccaccacagcaaaactaacaaacaacaaaagtgttgatttgcttacttttttattaatcattttattcctttacattacaaatgacatcccccttcctggttaccactctacaaaaaccccatcccctctgccttcccctccccctcccttttgcctctctgaggttgctcttccaccctctcacccactcctacctctcacccctctagcatccccctacactggggcatcaaacttccacagaaccaagggccacccctcctattgatgccagataaggccatcctctgcttcatatgcagctggagtcatgggtatctccatgtgtactctttggttggtagtttggtctctgggatctctgggtggtccagtcagttaatattgttcttcctatggcattgcagtcccctttagctccttctagctcttccattggagtccactcttagtccaatggtaggctgtgagtacctgcatttgtattggtcagactctggcagagcctctcagggaacaaccataccaggcaggttcccgtcaacaagccaacaagcacttcttggaatcagcaatagtgttggtgtctgcagatgggatggatcccaaggtggggcattctctggatagcctttccttcagtctttgttccattttttgtctctgtttttccattggacaagaacatttctgggttaaaaattttgaggtgagtgggtggccccatccctcaaatggaagcctatttactgggggtggtttctacaggttctatttcattttgggtggtattttggctaaagtcatccccattaggccccggagcctcgtgtatccctgacatctaggagtttctagtggctaccccccagttctccatctgccccatcccaaaatcttttttgatattcaatagtgattttaatgtaatattttaagaattcaacatacaatttaagcttaatgttcatggatagaagcatggatggcattatgtaatgaattttcaagatgaggacatacagatatcaatacattctgaataaagtatcagaatattagtggcccctcctctgagaacccacacctacagccagacccaagtagtcacctcctgcccacagaagtctcacatcggagggtgttgacgtcattaagaattaaacagcatgtgatgtgtttctttttaatgatattggttcttctctatgttatgctcatgaaagctctgcattcctgcttgcagcagtgtttaattcatttctcttgctcctttgtgtagatattcattctactctttgtggcatttgaatgactatcagtcgtgaacggctgtatataccttttcaaagtattcatgcaaagtattcaaaggccctcatctttagcaggctccccaatggttcctggagtactagtagtcacttccagcaggcagtggttcaccttgctccacaccccttccgcacttttcaaatccctcatctttttacatatttcttgggagagtgaatttcatcagattcacatttccttttttctcatgagcagtgaagtggagactatggttgtatgttggttcggcatcttagtaattgtgtttacagtctcttctcatacacatatccccccacacccaagcactcctcacttactgtatgctttgaatgttgtgggtcctgtttaaattgtatgcctagtccacatgtgtgcagataccttcctgtatctcttctaagaacatcttgtttcattcttaggtttaagatgtacctcaagttgctggtgtgtagaggtcaagattcagttccatcccctatttgtgtttgtcagaccaccagcatttgtggaaaacatcttattgtcaccacttcttacaaatagttgaccttatacagcaaggcactgtgtgtggttatatttgcttctgaaatggcagttttcccacctctgcttgtccatgtcttgtcaccacagtgttggttaatgtgaaggatgtatgattgctcctgttcttctaaagattttttatttaatcttggttattggtgtttcgccgtgaggtttagaatctgtttctactgcagcaatgcctcttgggggttttgactgaggttatattaaatctatagatcaatttaaggagaagtgacaagcttctgataccgagcctggcagcctcctgaagggtttatctctgtaggacttttctatttctgactgcacatgtgctgaccgagtgtatcttctggtagctccccacccgctcaccccatatgttttatatcttcaggttacagtgcgtcattcagaagtttatagttttatgatctaggtccagtttctaatgatatttctagtattatgaagatgctaaacattggacccttaatagcagtaattaaacaaaatctagcttatttaataatgtgctatgaacacctttacatgttgcacattgttctgtgcaattccagtttctgtaatgcagtcttccattcagtcattaagaatttatttgattttggtttaggctattacatgtagcagtgctatgaagagacaggtaagagctctttacagaatcagataggttctggaccagtgctagactctagtggtgcatgggctatgaatcttcttaccagtttggcctctagaaatgctgtgtaaattctcttctttccacaagtgtttacaagctcctgtttccagacaccatcattagagttcatagtcacacctttattgtgtgttttttccccacaagtgttgcacctaaaacccatagccatcggtgaactacaagtatcatgaaaatgctttttcttcctttggtttttctatactgatgtcataactccttgattcattcctttcccttaaaattgcaagacttccatatgaacctgatgcatgctttctctttcacataggtgacagcctagatgacgaagccatctcttgattgctgacccactgaccccctttatgttatgttttctggcatctgattggtgtccttttcttatttatcaaaggatatttgtttttgtctagaaggattgagatatggcacctactaacagaatgatagcatagtgttatttaccatggtgttttctctggacattatatgaaacaactttacctttttgtaaatccttaagatttctgaattgtaggtgagcagtggtaagctgtgaaggaatcacagctcttctctttactgcggttttaaagagtctgagatcatactattgaagcaatcgtctggatacccactggtctgtctaacctgccttgtatattgaacattgtgtttggtcaagtaagatgaccctgcagacaagcttaatccccatgaacaacattatggaaggagaaaatcaactatgacaatttgtcctcagatgcctccccactctccagatgcacacacttgtgtgcatatgcacagaaattaaatatatgttataaaaatgaaatactttctgagtgtactttgatggttttctgcctgcagctaatgtgatttatagtgacaggaggcaaatgaaagaaagtaaattttctgggattgtgagataccaaagctcaagttggccactttgtgcttctctctgtctctgcttctcttctccctctttgcctttgatcactgccaagacaaacaagttcacagatacctgtgaaacatttcgccatcaacatattctcctctggcatcatcttatgacaattgataatcaactttgtaaagtagacccaaggtgcaagagttcgaaaactctgtatttttttctttcttttaaagagatctttgcatttttcttctgttctttcctcatgaagctagtctgcccccaggcctaccaccccctacactgggaatctgctgagtccacaaaagtggagggacgatacagtaatgatccggtgtaataaaccagccaaataatgctctggtttctcagccttcttttccagctttaattaaggctctaatgaatatgtacttggggcttagggtttatcacaaatgaactatgatcaaatctcattacacagctagtgtggaaatgtgtctttttatgttggaaattattgctctgcagttgtatggcagaggaaaattttagaagtagctgaaatatatattttcgtctggaaagtcagagatattcaaagtaggttataatctgcatgaatgttaaatattggatatgatgattttagggtaacatcaagatgcttattacaaccattttgttttgactttatactttacacacacaaaagagtgaacttttccacttggccagtttctttacagtttatgctttttaaataaaataatattgtgcttttctagaaaaaagttgtgtctatgtcattctgaaattagtagttctttgatcaccattttcccttctgcaagttaggactttagttttctgtgtctgctaagtattggaaactttaatttgggaaaggaatattttcctcttaggcaacgctttcatggtcatgcaatgcagctgacctaactacatatctacacgtgtctattaatcaataactgcctaagattgctaaatactttccttgtgcttttatgacattaccttttgtaaaccttaatcagagtgtgacgtgtgtttctcctaaatggcctctgatgtggtgcctctcttcagttctctgtggtttcctgtttttttcatacatagattaaagacttttgaggtattaagtatcttaactttcttctttaatggtgcttcacacctaagctttcgtgcaggcctgtcttgctattttgttttcaggctacttcctacaccactctgtaatcacttgggtttgtgttgggcagtccatcagcacagttttctattttccccatttggatcatcgagggatatctctgtatgtccctcaaagccagaggtggtgttaggcctttccatagttaagtgcctctagtgtcattgccaggtgataggtatggcccatcagtggctctgagagaccagcagaatcaacactcatttaaaaactcatttaaattgctcattctctggcccctccccaggcccacagattaatttaggttccaaattctctgtgacaataagccctttaaatgacatagtctgtgctaacaatttactactgtagataatgatagtaattcagaatattcaagttataactgtatgtgatctttagtgagaaaatggggattgagagaggccaaggaaattttcgctcatttctgctcagtttctccagagacaatggtaaagaaaaactcaagattgaaacatgtactatctttctcacacatgcatatagctcttgtgtcctgttttgaagactgaaatataaatgtttaaagtatgaatagtttcttccttccatctattcatgagtaggaacttggcatgatgaaaggaggaaaggttgctaagaaacaaatgatgggtgttacagattttcatattgggaaggagggtggtcaagggctgggaatggctgagttctaaaagggagagacagatgttcccccaaatctgttcactagtcctcaaaaattctgaagcatgtcagtgcatggcttattgaaactgttgcagtatgatatataataagatatattgattggtaggaagagaataaaccaaatcctataagatggttacacttatgaaagacactttctagttgcattcataagaaacataaaagaacatgtgttttcacccctacaaaaagcatctgggaggtgggaggcggttgataattgatgattagtctatcttcagcatgcaaataaagagttcagggtggctaacacttggaccctagtgccctctgtttgatatgcatttagatatccatgacctggatatccatgaactaggattcctagcaaacacagaataatcaagtgaccatattccgtggagcctgaatcatgaaccatattttcaactattccaatgcaagcctgctactgctgatgttatggcttccatgtgctgccgtgaggctctgccgtcgatggccctgattccctgactcctgcttttcccttgcacagaactattgtaccatggaaagtcttcagacagtgcctgcatgaggtccatcagatcagctctggcctggaagcaatggctctgaagtcaaccattgatttaacttgcaatgattacatctcagtgtttgaatttgatatttttaccaggctatttcaggtaagatatacccttattttatctatctagcctctccttccctcccttcttccacagctccgtatgtgtttcttttctctcttatatacacagtatacacaaaggtatggacaacaacctcagtcttggtagccagtcattttattaatgtaagcacttggtcgttcctctacgcttggactgagtcctctggtacaagcttgtatatcgggttatgtgatcctggtaggttgctaccattcatgaatcatgggaggaattcatgaatcatgggaggaattgtttttaattccctgttctttcatgttgttagccttttagcccaatggctgctagattgaaaactttataggtgggtgtctgccagaggtatatcccaacatctctttggctgtgacattctttggatcagaagataaacagtaaacaggccactgttctatctacatagtatattatggtcctatagcactttgcaacttgcttttccctttcaaccagttgtaactaatatttttccataccattagatattcttcatcagtatattttaaaattcctttatgatattatatcacaactttatgttaatattaatttataaaatctattcagtttgttttttttttttgctttttccaataacctttttttgtgttttcaatattagtttcacatgatgttctaaagcaagtgacataatactgaaatagtttttttttcttttcttatttcacatatatatcaaaaccaaattctctaaatgcaaagaattaaagcttgtgttttcacaaacttcaaaacaaagttgtgtgttttgtatattatctatggggttgaattcaagcacttacaaaataaaatcatccttataaagtgattacaatcctagttatgataattatagtaaatgtggtaaaattgactagaaaccaagcttatttgtatgctaaagtattgttttaaacttcaatgtgatctattctgcttgtaatgtaattaagtaaactgttagattatgagagtggcttcaggtttcccatactatggattttttactttacctctggctgaaaaggctgatgtactgatttctgtaaccagaaaccgctacatgggctcaagttcaagtagcttggtgagaggagacagactctggcggacaacacggggcacattttactttatcacgattgagaaaccatgactctccatccactggatgtggaagacgaaattaaatactgggcagtgtatgtgtttattttacgtttctagtggcttaatggttgttctccttgatgtatatatgttgtaagcccattttaaaattatttttataatacaactgtagcgtgtaatttcaaaagatagaaataagccttgtagaaaaacatgttgctcagtagttatcatttacaacctaaagctcctgacttaaagatttctgatcattttgaagagcgaaggcttcacttttaatagagaagagggagagggagggagagatgactgcagatagatgatgtttcagtgtggatgtcaagtgctctattgcctccttcacacataactgtgtatagacagcttcattgtagttaaatgttcacctacactacttgactacttcaaggtgcatacattaccttatatgtagtttcacttaaaaatggccaagtagccttacgattctgaggtttgcttatcttgtgtgtgttcgctggggtgtgaacaggaaagtgaaagcataggtaatgtagcagctgtgatgaccttcacctgggcagatgattggcaagcgtttggaaacagtccattgtatcagcgactcaccaagtctgacgagtcctcggatttcagagggacttctcattccctctgaatgtactcactgtttaaatacgtcaaccataatcatcatacgcaaggctttaaataagaaagttgtcctgtggggtttgggggtctgaaatagagtagcatggctgtttagaaagcagtgaagtacccaagagatgaagtggggacggtacaggaagtataggaccacgtcacctttgcttcctcccaccctcttcctatgtctgcagggaactgaagcaggtgctgtgaagttgagaaggaagtggcagccttgggtggtcctcctagctcctcttctctccggaggcttttccctcctctttctcctcttcagctcaccaaagggaattgatagaaagataatataagtcatgcagtgaatccagggatcttttccccctctcccttccccaaagctgcaagttggtttcttttcacatttgccttattgcaggagaaccctgggccattgggagatagtgtgtgtggcaggtgtagaataaggaagggatattttagagaacctgttagttaaagtgtgagttcaagaagtagtagaatagaaaaatatctgagaggaaggaagccatcagtgataccaagccttcaaggagtgtctgactagattggttgagacccctcttctagcataacacagtgcttctcttaaatgcacctcagtacattctgttatttattaacagcctcccagaattttgtgaggaaaaggggtttccttaaatcccagacaagtgagttatagaataattaaagcattatttttctctgaagcatttatttcttctattttaagctggggggggggggatgacctccgactgtgtgaatttgttgccttcacaacactactgacacctcctatcacataaatatttctgcaataagaagctgccctctggcttaatatctctggggatggcctagccttcagtttcatcttgttttttgtttttagttgtattttgatctgctaattggttctctttaaactttcggattagaaacaatacataatttcaagaatggatgccgacattaatgtaagcagctctggtgtttgtttgttattccctctagatttgtcctccatagatggtggagcaaaacaataaaatgaaaactgaagtgtctggcttggcagtcattcctcagttgcctttttgacatgtgctgatattttcccaagtattgttttatgcaatttcagtcaagccctaagaagaaaattaaaaacatgatgtagttttcaagtgcagggccagtgtctctgctgctagtgttcttggggctcctttctaacccaattagttgtgtcagtgtaacgaggaatttccctaaagagtattcttgttaagtcaaaaagactaaatggctctttattactaaattattctttcttgttattcttattgtaagagacaaggtccttgcagagttctgccttatatgccaggaacatgaaaaagtttcaaaacaaatgaaagcccgagcgaacttgcctcacgtaatcaagaccgggtgcctgtttcagcagcttgaagttggggacatgagacacctcctctcttttttttttcttacatagaagatttgagtgacgcgtctggcagaacagatggagcaagctgccagtgctctgggataaatgtagcttcagccttggaagtattgcagtatgattcatccacaccccgcagcaaagttgcctgttactggctgcctctcgtctcttgccgtggtacctggagagacacctaattagattaagagagattgatggcaaacacatgttttcgtgaaaagctttcctctcactgagcttcctttcaaacatttcccaggtccattaactgggctagcataaagcaagtgtggggtctggagcctgttacctcagaaggagcctcccctctaaagcaagcctgccgaggtgcaaccatagcaacctgatgaccgtgtatgtgatgctgcctggatgactgggatccaggcctgagcagcgcaggaatgctccttggccttacatggcttgtggtgattgtgtaacgttttccagaacacttaacttttgtaacgtggcttcctgttatatggtttcctgttatatgaggcagcagtggacagaacagatgggaaagatgaggactatagagagataattttaggtaggagggtctaagagggcctcattgaggaagagttggtagtcatctgattggttgggatttgaaaaattcaaagatcctaaggtaggggagggttttgtatttgagactggtagaaaggccattggggctacaccaagaaaagccaagtaacagtgctgccaacatgtagaaaaacagccaaggatccaacctgaaggccagttggtcaatctttcatttcgtagtgatcacaaattctctattggctgtctacttggttttccttttgccctctctgttgtactccaaagaaatatgttttctatttaaacatgtttctttaaaaccaaaaagcaattgcctatttgtcattgtttacaaaggttgatctaatacttatatttacttaaaaattatcaaagagcctttctttccctaagcatgagaaacagtgtcatcggcgtgtgttctctgggtaattgctttccatttatttatgtgtttagccctggggctctattttacggaattggaacttcttggctgtgactcacccgggatacatggcatttctcacgtatgatgaagttaaagctcggctacagaaatacagcaccaagcctggaaggtaagcactaatctggacgatctgcttaaggagaaaacgccctgctgttcccagctctgagaattacccatagcctccaaaggcaaggtagtagggaaagcaggaagactgactgagagggtgcatattaattgagcccttaagttgacttttaacattgtcaaaagtcaggagcttaataagtttaaagattctgtaatcctcagttctctttctcaaatctgtctgggatgttttcacagtagttttgttgggtacacagtgttcctgctcaaacttacgtatgtataattgaacccttgagtattgtacttaagacaaaagtaagtagtttacttatgtgtgcattattttagcacagtgttgagtagtttcaggtagcagctctgattaaacagaatattcagataagtacataaaagtatatgaatttatgattacattccaaactactcccatgcccttgtcagtttggcatgacccacttctttacatcttcaaagtgttatgttttgcttttcaagttactaacccaagtgactatcagagggcttggtttctagtcagttctgctggcatcgtccaagaaatcattcctcacgggcaaataagagactggaaaaatctatctttctcagctcagaggatgttcacacatgtgtcacctaaatatgtgttaggcacacaatcaatgacatctaagaaatagtcaataatacctaagcatagtcctggggacaatatcagtgacatcagagatactccctggaagactttacgttttagagttggtcactgtaccattagactgttccatttctatgagaaaatgttttctttttttaagtctatatttctgctagtcatctttatttgacttagaataattaagcttggcctttgacacagttttctcaagtcaaagccaagagttttaattccttctctgataatgaaaatgctcatgttcctaaagatttaatatgacatatttaaagaagctagtggtatgaaaaaaagtcagagtccaattgacgccctctctgtaaaacctacagacatgactctgctgacccagagcagtggtcagttaactttcgtattttccaaagtttagatgaatcattttgcttcattcaaagttcattcaatgaaaccaatactagaaagcaaattatagtacgtgcagtgtgcttttactatttaaaatacatagaaaacctccttatgaacagatattcactcgctttgtaaaatatccatctaagcagccctttctcgtcaaaagtatttgtcctctggcctcacatttaaaaataaaacatttaattccattccaaggacactgtggttccttcagtagtgatttatctgtcataaataaataaataaataaaatgaaatatgtaatatgatatatatcatactatatattatatataaataaatataagactaataaatcattagctttttgccctaaaagaatgtttactgagcatgcagaagggcctgcatttgatattcagcacccttccaaagaagtgggaatctaagaaaatcatcttttcgtgccttttagtattaagggtggctttcaaccatgagctacgttatgacacagatctatcagattatgttaatcacaccagtttgcagaacaaggtacaacagctgaaagtaactttacttcttcctaagggaggtgagacccgcaggggtcagcagccaatgacttaaacagtgttgggcaaatggaatcgagcagaatgctgagagaaataaatcgctcttaagtgtcatctgtggccctcacaatgtgttactaatggcacactttgtagggagggcttgaactcctcagtaatgactggttttagaaatgccatcatgaaacaatgcaggaatttcacaaatattcaagatgcataaataggcaatcactttaaaaaataaataaataaataaaatgtgtaatatgatacatatcatactatatgtaatatataaatattaagtggtgaatttttgaattttcttttagcatcacattcaacgtgttttctaaaatacataggccccaccatctctgagatttctacattttgttctttatttgaaagtattatgtgcactttttagtaagtttttctaattgggaagaatgatttactgagtgttaggtatgaacacagtgtgatgcaggtctccctagaggtcagagaggggatcacatatcctggaactggagttgcacgggatgtaaaacaccttggtgtggttgctgagagccaagcctaggtcctcttcaagaacagcaagtgtccttaactgctgggccatttctccagttcattccttaatgtaacaagtgatcttccaaattataattagacactctatattatctgagaacaattttcattatgtagcatttgtctgatttgagtggaaatattttcctgtttctgattaatagtattagtaatttatatgtaaatactttatcattagggtcacttaggggcatcagtttatactaatttgaaaatccccttctgagaactctttgaacaaactccctttttgttcaaagcctgattttcttgttaactgacatgtaattgtacccttcaccatatgaggttattaaatgtagcaacaaaccatcctgtatgataaactatagcagcatgtgaagttttttttagtgcactctatttatcaataactaaaacatgagaaacttttcttgcttttccccctgatgtatgcattcatataacaacttaaatatagccagtaggtcttaagatgacttttggtctgattgacggacagattgtatagtccagatcccaatatcttgatggcaagattgagtggcattcaatcctacaaagtgggataatgtactgaaataaataaatgatgatggatttaaatcaacgccagtatctccctttattggaaattaatttaagagatttatcactcatttgaatgaccggtgtttgaattatgttcgctgcctttggaaaatatttgaatggcaggttgtgtagaagctatgaatgtatcacatgtgctttgtaattgatatagttcagctcctttgaaatttgtttaaagatgaatcactgaaaggcttgcaagaaaacattaaacaagtctatgaccaaattttaatgcctaaatggtaaagtaatatattgaattcctgtttcagtttccatggtggataaattaattatttagctatttgcttcattttatccttctccaaagatgatttatgtcacagctctatcacagcagccacatccccacacatctctttgagggcggtaataaatctcttggtagtttccagcctcatttattttaaatagaactctggagatacttaaatgaacaagaattattatcagtgtttcttacacagattgataacactaaggtacagtagtgttagattgtggaaaaggattgaaatttctatcaggaattctaaatgatgctgctcaagaagacaaaatattaacaaactgtttactggttggcatgcctccttgagtttgaacgaacatctttttaccatgtttcgtagttacattttccggttaagctgcactcggctgggacaatgggccattggctatgtgactggggacggcaatatcctacagaccatacctcataacaagcccctgttccaagccctgattgatggtagcagggaaggcttgtaagtatgagcaattctttcaacttgcaaatttcataactagaaactgtctgggcatagagcataccatgggcatagagcaggcgagtaaggctaatgatctcatagtttgcggtttaccttaagacgaaccaatagcaatagtggtgccttcagtgtgttgctcatgcctaagctgcaattttatgaccataattacatagagcagacacatcccagcatcagaaagcattactaaaacataaaggcactcttaaaatatgtgtataaactattactacttcagagtacttcatttctgttattttgtgtaaagctaaattgaggctgccttttgtgtggagtactagatttttttccttcctaagtcaaagaaactctttgctctgtttgttactgtgtgagaatattctgtcctataactccaattttctccttgtctagcagaattttctaatattgattactatgctgtttgtagacacttcatttaaagaaggtttttcttttgtcatcaacattttgcagactttttcgttaaaatagtcattactgtgcacttttaaacttttattaagctctacaatataaaaaattttcaaaaggagtaactgtgagttctagtcacttttattgaactagttataccagcaataacattatggtcatgttttactaaaaatgacatttaatgacaataaccttgactttcagtatacttatgaacgaaaatcccttattgtagctttagctcaagttagattcttagtagaaaaccttgatccgcaaacctgtctgtgtggctttattgaagtcagtgaattgtggaattgtcatactttccagtttttctgacatgcatgtgcacatattacaaggtgcatatttgggcattgtgcatatgtgtgcctatcggcaggagtggacagagtaggagagaaagacagggatgttgggaaaggacaccatgggagagcttcattattcaggccatagctatggcctaatctgttttctctccttggaattttcaacatgtaataagtatgatgcagtttgatgcttccaagaaagtatataacaatctgcaagtagagcttgatttaaacagttttaggataggctataactcactactaaattaactttctaactttatgaggactatattactaattgattttaattgaaaatattatatagtggattagtttatattatacttttcctatgattgaaaaaagaagtgcaagagtatggtgttgatttatgggaaaaggacaaatgaaaatgtgagtttaaatatagagtactctgattaaactgaacacactgaagcctcatacattaaaataatatggtctctgtttaaattcagttatctttatcctgatgggcggagctataaccctgatttaaccggattatgtgaacctacacctcacgatcatataaaagttacacaggtaaggagaatttttggaaagataataatacatatctataccaccccagaaataaatgtaaacttctacctacattgtgttcaaaagcatgccccagtgtttaacatgataacatcaggaattctgagaatacgaataaattttatgatttcttttagatacatttttttgttgttagtgataatgcttgtaatctaatatatatatatatatatatatatatatatatacacacatatatacacgtacagagagagagagaaacacattttaagtatgttcatacattgataaacagtaaaggtcaaaggtggtagaaaattttttattggttttagtgtccacagtcttgatatgctgcagtatgagagggtaccagtattcatggaaggcttttcatagatgactgccattcctatcaatgtatagcagttttataatgtatattctaatatgtataaagggatactaatgagagatcactcctctttctgaatccactttgtaaattgaaactggctgggcatgacttcagaagacaaacaccttcctggcatgcctgagctctttagtttgaactccagtgttacaaaataaaataaatcagttaaagtgtacataaatcttccagaatattgcgctccctagagtttcacataaaatagccttactcctgagaatgcagtaaattccctgctcgtgacttgagcatgctctaattgcagaccgactcgggcagatctcattgctagagcaggatgctcaggcgttcattcataagttggcatgggttatttggtaataattcttttccactttctttcatttccttgtccttatttagtttactaaatatctggcaaatatcatagtggacgagatttttatgtatccatgcatgcattcatgtatgtgtgtatatgtatgcacaactagaacattacaaagttttagtaatcacacgataagaatgccatttatgtattctatttcagtatctgttcactgaggttcagtgtgccaaacattctacactcgactcagccagtgtttagttactcagatgcttactgttcacatccttcagagttagaaacttactctcgaatttgagagcagtacctgaaacctcatggtgagcgaacgctgcgctcgcactcgtggactacagtaagtcaggcagcaagcacgcatgaggaacgaacgttgcttatccttcgtcctcagattcctaaagatgcctaagaaataaaatgtaacatccagatgacacttactcagtttgtcagtgtagacaaaaaagaaaagaaaacaagaaaaaaagaaaagaccgagtcatttatattgtcatcttaaaactgtacgtactgcctgttgctggtaaagcaagttctttcttaaagcaatagcataaaataaattaaataaccgagagcgctaagaaagaaaagcttacatataaactgatgccaggagttcggacgttgtaaaaattgatttttttagaccaaattgtgaatatcaatttaaaatgtgtccttaaatggtagcagaattctgacaagttcaagtgtgggatatttaccataagtcattgtattttagggaattccatatgacgacttcatgctagtaaaccattaaccgccggcccttcttccctgtgttccaggagcagtatgaactgtattgtgaaatgggctccacttttcagctctgcaagatctgtgcagagaatgacaaagatgtcaagattgagccttgcgggcatctgatgtgcacttcgtgccttaccgcgtggcaggtactgccttgttgtctgtcccgttcacacttcccctctcagccttccacatcttactgactcaggaagtaatactcagaactgttttatctaaaatagtaacttacattaaaaaaaaaacttactatgttgaatgcgtaaaattgatagctttgctgcgttttatattgtgtttcttacatgcgtgtaacttaagttcctgttgattataagtggttctgcatccgtcttgccgttagtgtcatgatgacgccaagagagagtatttaccaggtgagcgcttccagtcagctcacgtcgtgctcctgggaagattctgaagttcggtggaccacagcagatacagcttacgctgctgccgtccatcacatttctcttctcctgagccatgggtcatgtctcacacgtgtttatggttgctttcatgaaaccaaaacaggggaatcagagaaacatgactttgaagcagtttgtacccaaacaggcaatttccagttttgaaaaacgtaatcaaagactatcttccttcctgcccgtgggtagtcagtcactaaatacaaaatgagtcagtggtttagaataaggccgtggaaaagctgttttcccaccgatgactttttgttgtggtttaactgttgcaacagttggggatttaaaatggttatttttgacacaattccagttttagctaactattttgatcacgccatcttgcaatttgctctttaacggagccctgttaaaactaggagtatgttgctgtaatttggcaatcaaaacacttaatttttaaacctcagccctctcattctttggccatcattttctaaccctgaattccgatgtaaggggaaatagagcagtaggggagcgaggagtatgaaaagagctgtgtcaaaggtcatggtacctgtgcaacttgtggattggtgaaaagatgtaataactatcacaatttcaatccctatgtgaagagagcttaaaaggtggtgttgaggagacagtgaagtctagctgatgggatacttctagctgattcacacacttctctgtgcactcacaggcatcgttatcaccccagtcaacctgctcagcatctccatggctgtcctctccgacatgcttttagtatatatgtttccttaagttttttttttttttttttttttttttttttttttttttttgcaatctattcattttgaagatgaatctgcaccttagaggtaggaagaaagggactcggtgtgacatcaggaagagttgttctcagccaatgggtacccaccttgctaggtctgttaacagccatcattctgtaaacttagcaaggggtttcttgaaactgacttgcgataaattttgatttgctgccaaaagtcagattcttctgcaccttaggacatttcagatgaaactgtacaaagtgcggttgacctttcacctcctctgactgcctgtgtaggggtatttaggtctgcttcacctgacacgcatgcaggatgccaggatgagtgctgaactgagaagaagtcaagttgtatcgctttggtctagtaatgccgttcttaggcattcctgagaggggaagaaagcttctttttttgcttttgtttatttgtttgtttgtttttattgttttttttaaaggaatgcataaatttaggatagtgcacacccgggggcctcaaatctgcaatacggccatgttatgcattctgggaattgacatgtttgatctagtgctgtgcttactattgggaaggtagatggtttaacatggtgctatttgcttgactgggatgaaagctattgtttaatacactctgcatatgtagcttaccttgtagcctaaggtgggtcttttaactgtatgcttgagtgtaaaacaagaaaaagtgtggtaattctgtatactctttgaaggactgcttatcatcttttttcagctttctgtaaagctttgtttcagtctgctgcataaaagggcatggcattcattccagcttcttcctcctgtgttgttgatgctctgccccttacgttaccacagctttgcctatagttcctctttctagctgataatcagttcccggatgccttgcatacattttcatagtaatgttagagaccttacatgtagatatgtccagtagtgttcataaattattagcccttactgtttccccttttaatacttaactccctctcagtttcactgtttgaaattggggaagtgcgtgcacgatcaagcactggaaacaggaggaaatcagtagacgttatttgaaaaagtgctagtaaattaataacttattaagtaaaattttaaaaagtaactatttcaaatgtgttcatgaaattgaaatatgtctcccgttaaattacacttacaccactagtgagtactgttatcttaaacagatggtcagcttttgcatatagacaaagaaaaaatggcaaaattttgatatctcctcacaaaaatagtattttaataaatgttctggttcagtctgtacaattccataagcttcttcctggttacattgtaaacatgtctatgtatacccatttgcagtctagagtatggatttctgatacagggatcgctttgcatattcatgtccgtgcatgtaggcggttacccaatgctgattttcaggtcagatgctatgaaggaaagtggagggggtggggggggggcatgagattcttctaactggacagtgctgtaatcatcgatggaaaacctcatggagtgcttgttttagactgttagttcttcatgagaaggcattacctttcagagaccttggcgtcctctctccctgacaatgtgcctgaaaacttgtagccacaggtacatgtgttctgtgctgtagacattgtaccctgttatttacctctgctgctcgcttaacctctggcacagatggccacaagacctggcttctacttactgtgttctctcaaggaatatttgcagtgacgtctgatgcacattttcctcatttttaagtaacttgtcatttggacatggcttgaaattcctaaagtggcagtctggaatcactgcatctcagtggggtatcactagtgaaaactcgataatcagtaaaggtgtctactacggggtaaggggcattcctacatccacatacaggtatcactcaatatgccctgctgactaggttatcagtgttcaaagccttccagttagtgcatgagcagcaatattgtgtgatcttttagacatgttattaaaaaagtttcctttattaagagcaagtgttacaaatttaattcaattaaaacatagtgaaaaaacgttcagtaacaagcccctgttgggagtgtcagtttgaggctcactggatttaactgatggtgtgtgcctgagcagagcacatctatagaacatttctttccttctgtaatatattgtcaaaccttgaatctaaacttacagatttactggaagatttctgagtttcggagctctgggctgaaagaaaggcaggttgtaacagatgtctctgtgtttttactttgcccgtgttccaaaatgatacagtacagggtctttttttttttttttccttttttctttaaagctgttagttttacttcacgggattttccactgttacagccttataaaaagttaagcttttaaggtcaatcatgcacagcacaaatctatcgttgaacaacaccctttgataggaacaaacctgggcacgtcaacatttgcttcccgagaagtcaagcctgttgctttgacttttattttaaggaggatctcttgagcagctcgtgtctctatagcaatctctgagcagaaaggaagttcagacgtagtttctactttaaactcactgctagaagttttatagatgggattactaccagtaattacctgaaacgagtatctgcttctcctgcagctttaattagggacatgaaaccgtttcctctacctttacagttctttggttaggtgtgctgatatgaaaatgcttttagggaaatgcatgcctcccaaggagttaggatgtatctgtcagcatccaacagggaacactgaacctggactacaaattataatgtgttcaagaaagtgcatttttagcaagttgttcttcactaaaattgtctttcatttgatgccctgttttagtttaactccaattcattggggacttaaatttgatgtaattaacagcaaacctaacaaaggcacagtagtggttgctgttacagtctgtcagtgggtgctccttaattgctgtcataatggcctattagtcatgcctccaaagaggtgtcagattttttttttcattttctgaaacatctgtgttatttaataaattgaataaccacggaagagtttgcccagaataccaagtaagttaaataatatgctttgtggagcatttgaagctgagtttctctgggtgcggcttctctgtttcactcttgatcagtaaagctcgcgggcacccctctcactttcacctgtcactaagaggcagagaaaacatctccatgcagagtcccgagagcatcttcttcctgtgtacacagtctgtaaagcactgcagtaacccagcagcggcactgcacacagggtaaggtaaggagctgcgtctctcttgacaaaacagaggcaaacaagcagttctgctaaaccacgtctgcgcttccagatgacgcaggcagcaaactttgaatgtctcacataaaaaaggccatcactgtcaatgccacgcagctatactttgaattctgccaacaaccctagttttatgaaatggaaacttaacttctgtggcttttcccctagacttttcttcagacacgtttgcaggaaagacttttctgtgtccaaagtgttgtaagaaaacagtgagtgcattcaaatatgagtgtggcgttaatgccgtacgatcaaatagagcactgtggagaggcaaaaatctagctcactgcgtatgtctcagtgagaaacagatatgattctggcttattttaaaagcaacattcgcatgtctaaccttctagaaactttttaacgaaaactaaaacaatatttgcttttaagaccgtttcaaacgtacatttctctctttgccttctactgtctcttttctgggttagtgtgatagaacagactggagcgtctctttctcagagggggactgaaggagttgggagtcttggtgagctagtgcaatggagcaggcgtgaggagtacccaggcctgagaggagggcgggttgacggtgaggtgtaaatcagagaagcctttgaagaggctggcctctccctacaccttgctgaggcaccgaccctcttatttgtgcccagtctagcaggcctcagattcctggccagtctcctgtctccacctcccattttgtccacaggagtggtgggattgcagacaggtgccacttatctgcatccaactgtctgttccagtctgcgggcttgaaggaaagggcctgtacctgtggaaccacctcacccactgcagcaaaaataaactcccggagaacaagtctaagttagcctaagtctgctaactaactcagtagacggattctcacagcaccacagtgtatttgagaactgaaatggacaatttgggaacagtattagttgacaccaacactctactgtgggctgttctttttgaagacttatttttatttgatgtgtatgaatgttgtgcctgtgtgttgtctgtgtgtcacagctgtatctgtggaaaccagagaatggcattgggtcccatagaactagagttacaggtaatgtgaaccaccatgtgggtgctaagaactgaaccctggttttctgcaagagcaataaatgttcttaacctcagagccatcactgctgcctaagccatctaagcgagttgctgttagtcacagcgcttcactaataattcagaaagcaaataaattacatgtgtaacgcttatcttaagacgtttaagagacaatgtgtcatggtgtgtgtgtctgtgtgtgtgtctgtgtgtgtgcgagagagagagagagagagagagagagcaagcaagcaagcaagcaatgtggtgattctggtaatagtttcaacttgcagtgttcatttgcgtgcttaaagactgtttatagtaaagcagatttgttttcttcattattttttctgtattttctatcattggattgttgtggcctaaagttatgtttatgtatattaatttaaggtgttaatggatggtatataaatctaaattactatatgatggatatattatgtaggtaatatttaggtaactagttttcactggtaacttctctcaccttaaattttgaagtatttctacattggggaagtgaaagccactgagtcaattagaatagaaggaatcttaaatacttcctcctaacattcacaagttgtgaacatcttcaggactaagtacaaaattatttattgttctttcttctccggtaacatatgttcttcgatcttgacttaagtatatgttgacaggaacattattttaattatcgacgccccatcctgatgagttatgtgtctattctagacattcttcatctgtattcaatcaaccatatgacagaaactagggcagaggaaccaaagtctcatttgaaaatttatggctatgcctcatttgcatacgacagtagttaaatgaaagccaaagagtgatgggtgaagtcataccagaggatacactgcagtcagtgtgagccacttgtcaatcaaatgggtagtcagtgtagctgttgacatttaacatccacgagatgtacatatgttagatctaagaaaagggatcacaacaacagccatgtaaacaggttggagaaagaccttaagtcctggtttataacagccatgcccgggctttcttgtgttatctgggtgctgttgcctatcaccttcttcctcctctctccacggaaaagtcattcaatcttaggaggaaagtggtagcgtaaattcaaacaatccttgaccaatgctgcaggatgatagttctggaagtgagagcatgataaagagtattacagcttctagtcgctgtactaacaaatgtacagctttatgattgaatttgaataaagtatttctagttgcagtagttgcacttagattgttaagtgacttgtggctaggtatccatactaaaatatgtgtatatgaatttatacagtgtacttcaaaataatagacaggtgaaagacatgaaggcatagaggaaacagactaggcatgaactgatcattattcaaggtgggcattgaatacatgtattcattatgctctatatcttaagataagcgttacacatgtaatttatttgctttctgaattattagtgaagcgctgtgactaacagcaactcgcttagatggcttaggcagcagtgatggctctgaggttaatttgatacaacagtgtttaaagtgtattaggaatgagatgtccacatagggcccagaattctactttccattcatttgtcacacattcttgttacagagaacgtgagttccttttcagcttacacatgaagagctcccttttttgaatgactcgatataatgtagatctatacagaaacaccagtacatacacacagtacgaactttaatcattacagtagcgagatttcatccagatgataatgcgtattaaattggtcctgtaactttaaggttctttttgtaaaattgaactaggaaggtttagagttctttaaagtttcttagtgttaaaaggtcaaattaaggagattacccaaaatggaagaattcaatcttgtttcttttaatcttatgtgaaattatgaatcacaatatttttatggccatcagctctgaacatgattgctatgttttctctctctctatctctctcgctcactctctccctccctctgctccctccctctctttcttcaaaatcatatgtatacatatgtatacacatgtacatatttatccatgtattatatataattgtacaattttgagtcttaaaaatatgtaaagacatataaataatgttgtttcttttaccaaagctattcaatgataatttttctttttggtaatatacattgtaaagaaggtatttagtctgttgatccgagagaagttaaaggaaacaatagaccaatagtatctgcttcatagtagacatctgggatctgtccagaggtgtccagagaactttttacaagcctctgaagccacactgttaaaggcaggtgattcagcttccacaggccaagtggctatagtacagtcgtcctgagttaagtacaggatagctttttaaaatcatgatactttgtccagcttttttttttaaaaaaatttaaatttttaactttttacaatgtaatactaatcttagtgtacaatatcaaaatgccagagtagtgactgtcttttaactcctctgtctagaaggcagggtgagagggcatctcattttgtctgctccctactgggaattttcaatgctgttagagcttagagatatgaatttggaaggctgaaccaaacctaatgatcaccaataaatgcgtttctcaacccaaagtattttaccaaatcttttgtagccgctgctttgaactctagattgggaggtagttcatgtcttccagtggtagattccacatgagcaagtcaagactgcaggctcggcagtagtcagcttcccactgttgagtcagaactgagctaagtcaactgaacgaatgaaatcttggttcatgactcctgaggtttcaggctatgcttggtggggttccttgctttgggctggtgataaagcacatgatggagccaagatgttcacctcgtgtcacctagaaattggcgagaaagattggaaagagggcagtgtgctgataacaccttcactgccacacaccagtatagctcactgcattccagtaagctttgtgtcatgaaggtgataaagtagagtgataactgagccttttagaggatgtataagatgtagaccataatgcttttagcctagatggttacttctcaatagttttattttccatactcattcctttattaaccaagatttgacaaatcctagaggatgtaagcagaaatatttacccacagttggtaagcacaagaacttttccaaagtagacttcaaataggttgcttagattactattaattattgctctagtcatttttaattttgccaggatgttctttttatggactatttaattagcattgttgttttgaagagggacataattcatttttcagtatttgaggactgtaaatccttgctcattagaactacaaatggatccgtgtgaaaattaagttaagcttctttacctgtccaagctttatttttttgcatttgctcataaaatattttgttgatttaccacctttgtgctcaactgcttcttcaagatatacccatcattgatccacagacttgtgaagcattttataaacgtccaaccttcagacttctctagattggtttgagccagtcagtttgttgtctttgttgcaggagtctgatggccaaggctgccccttctgtcgctgtgagataaaaggaacggagcccatcattgtggaccccttcgaccccagagatgaaggctccaggtgctgcagcatcattgaccctttcagcatccccatgcttgacttggacgatgacgatgatcgagaggagtctttgatgatgaacaggctggcgagtgttcgaaaggtaaacgtgagtgcacgagtgcagcttgtgtgctacaattaatactatttaattagtagtaccaatcaattagtctctatgtgtgtccttggctgagaaagcattgttgatttaaaactaaggttcaaatataagcagtattccctttttcaaaaaaagtatagccctcattccccatcatggaaatttctctttgcagctgataaagacaactgcccccccccgcccccgccccaaaatcccacaatgaagtgttagagttgtgcagcccagtcccagtcaatgcacccacagaacacccctgcagctaaagcttggggaacactgcaaagtggggaaaagatgggaggaaccagaggactgtggattttctttcaatctaacaatctcagaaggagggagtctcgccaacgtgactgggtaacatgagcagaacaaggacaacaataaataaaagtggatgggggaagaccatgaggcctcaaccatacacacataaccacagacagctaaggaatacagagtggagaaatagtctttcccagagaaaagtccaccaatagtttatccaatgatcaacagtcagccctgaaaacatacatacaagtaatattatacagactgagtgggttatatttaaaagtaagtgtgtgtgtgtgtgtgtgtgtgtgtgtgtgtgtgtgtgtgtgtgtctcaatgattagtaaggaaagaggccagacatttgaaagagagcaaggagaggtattttggggaggtttggagggaggaaatggaggtttgtgtgattatatattctcaaaaataaaaataataatttgaaacactacattcagtattaatcagttcagaaaaatattagatgaaggggaataatttgtttaaacctagtgggagtcagatgagaacatttgtataaaattaaaaatccaagaatgagattaacaaatgtggagaaaaatagaagataggaagttattttatttgaaatagtaagattgtacttgattaccatttttgttgaatataaaagtgtccagaaacgacatcctgctgctctatctataagaagtcgcataaaatcatctcagtgaatgcactataacttaagatttgctggttaagttagagcactgaccttatgaactgaaagtaactgctccagcccatcagtgattacttcacaaaagaatcagcgtggcagttgaataatttagaaatcagaaatggtgggtagatggctagatctcagactgccctttgtatagaaatacatatgaaatccaaattacatggagaagttgaatgctgtggacctcagaagtggcattggttgctatgagagcatctgtaattacgggaaccatctccctcctggctcctgcagacatgactactcagccacatccctctgaggttcacattggcctatgagctttccaacaaagccttaaggagagccctttgccactgaggtggagtggtgatgatggcagccactttaggaacttcaacctatgcccctattactatacagttgggaaagagtaggtgcagagtccagaggaggccatttctacagctaattcaaggctgattcaaatattgctgaagaaaactcttggaatttctgtccgggagttccacactgacctcagacattccattatcctatttacttgaaaaatcttacatgtgcaggtaggttgacatcaccagtgtcactatgctccaattcagctttgagctgaaaggatgttggttcttcaccctgttagatgtacataagttccataaggtaactcataggctggtgtttttctccccttttggggataacatctgttgagttttgttttgctttgtttaattatatggcctctttgacccaagagaaagttgttactcctcagtaactctaaataatgaatacagaagaaagaagtctcaaagagaattacaatttgagcgtccagacaactaacattcagccttccagataaagggagcagtgaaccagctctgtaacaggatagaactagctctgtaacaggatagaaccagctctgtaacaggatagaactagaaccctctgaagcaaactacttagcacccttcccataatctgcatcctcttgcaaagcacgacagcaacagccatttcctataataactgttgaaatgatccaatgaggtcacatatttaagaggctaacacattgtaacgtcagttggaccacaaatagtggctattttattgcctgtattaattgaaattaagaaagccgcagattgtgacccacttcccagtctgagttagtacagatcattgcatcctgtccatataaaaggagctacactggcacatcagggatgatgcttccccatccaagaagacatcagggacccagctcactgttctgccagtctggccatgcctcatgtcctgcgtgagagtcattcaaaatcaagaaaggatgcagactgacagtgagaataaaggagcggatgctgtaacattgcctttattgattgatgggactttctcccttgaagtaacaatttgcatatcaagtgaaatgtgttgaggtgataatgaagcaataacatagtcactttgattcctatctcttgatctgctcagcctaaaatattccttacctgaccctttcagaaagcttgttgccccaggtatagctttcagggtgcacttagtttattgagtgccagcctgggtaacctccgatggcaggaaagcatttgagaaacccacaacagctcagacagttcagacaatttctggggcaccggtttctagctaggaagaaggcatttctgtttttctgactaaagttcagagttctacaagaagattggggtgtggctgcaagaaaaattctctcgagaactttgtgtaccttgctacttagagaaggagaaaacacctgtcttatgtcagtttgaattaaattgaagcttaggcctcatctcataggactctagtactacaaactgagaatggagtacaaggtgagggacagggctgccttctgtcctctccagcctctcctgattggttcttcctgggaccctgcgaggtgtctatttggaaaatgagagactttcagtaatcctctctctgtgttgtttaacccaagagaaggatgctctcctgcattcttggctcacatctctcaatgattctgtgaccttcagtgttccactcccctacagcagtcagatattttagaaatgcaattaaattgccgttctttagttttaatttgatgtcatgatttaattaagtggctcttatgtctactaatctgtctagtcagttaagcagatcatgacttttgtattatttcaccaacctttgccacttagctttcatccttagttttggtatgggtgcaagcataaattctttctgagtagttggaaaaatattgctgcaaaatcatgtttctatgctgtgtttatgtgttttagtacagctgctgtgtagacttattacagaagactataagtgctaaaaccaggccacgtctaatgtttttgtcaccaagacacactcagtaattatctaaaataaaccaatcaatgcatgtgcatcttctgtctgagggtggttacctgatcaaatctcgtgctttaaaaaagaaaatcattttaattttaaaaagaaaaagttcagtagattttatccagaagtgagttagaaaacagattataaacaactcctaacattgacataggacactcttcatgcatgctcttcctgttttgtaagcatcatcaacttattctgtattttttttatttttagtcttgctttcccaactcaggagcgatgtgcatcactgaccaacaggaagattcaatgttctaatctgctacttccgttgctcgtctttctctcctttcataaactggttgatgaccgtattgtgcgatcgttcctgcctgtcttaagccttttgcctttattaaagtaatactccttccatcattacatagagaactgagccaactgtagtttcccgttaccatggagatttcacacttccagtatttgtaagttgcccatacagattgtttccttagcattctttcattagtaaaatatatttggtaaaaatggtggttcaaataagcagagagaatctgtgactgtaaaatgatgagttgttgcctttctagataggaagtcgttttatgatttcattcaaaagtgttttaagattttgtccagattggggccattatctaagtttctgagttatgagatttcccaagtaatttgttctgcgtgctgtgagccccaggaagtagtataggtatgatgggtgggaatgttggagttttctctgttattacagggacaataagatacccataatgctagtcagataacttcttaatattggaaaagatcagcaaattcttcttttaattgttttatttatttacattccaaatgttgcacccccttccccgttccccctccaagagttcttcatcccgttccccctcctctttgcctctaagagggtgctcctaccccccccccccgccccccaacacacacacactgtattcctcttccctggggcatcaagtctctataggattagattcatcctctcccactgacgccagacagtgcagtcctctgctacatatgtgccaggcgccacagaccagtccagtccatgtatgctcctggttgatagcttagtccctaggagttcccaggagtctgggttagttgatactgttggtcttcctatggggttaccatcctcttcagcatcttcaatccttcccctaactcttccataggggtccccaacttcagtccaatgattgactatatctgcatctgtctcattcagctgctgacagaacctccttgaggatagccatgctaggctcctgtctccaagaacaatatagcaccagtaacagtgttagaaattggtgcctaaccatgtgatgtatcccaatttggcccagtcattggttagcctttccttcagtttccgctccatttttgtttgttcctgcatttttgtaaacaagaataaatctgggcccaacattttgaaggtatgttggtgacaccattcttccactgggtaccctgtctatgtactagaggtggtctctccagtttccatgtccccactgttgggcatttcggctaaagtcatctccatcaagttctgggaacctctcacatcccaggtctctggaactttctagaggttccccctcctcccactccacacagctgcatatttccatttattcttctagtcccccgggccaatcttttgtctccccctcccctagaatttttttaatagtttgttcgtagaattaatatttaataaatcctggcggcagattcgatacctggatcaatggtttatgtatccgaatgaaagactcacacattgcctttatatttgaatatgcctaaactaactcaatagctggaccactgcctaacctccatgaggttaatctaccttctgacaataatcccaagtttttattactaagttttatattctattttggctgctctgggctccgctctcctggctccttcacgtggcagccatgcctctctgtactgcactcttcttaggcgtggcatcactcctctcctcgacactcccctggcatgaagggtctttctcccagaggactaatatataatgtcattaataccatcaaacttacaactgccttcattttgataattacaacaactcatgtcaattgaaaccatttcaaacagttattattccttgagataagttttctctatttctgtgcctttgtttcctacatttgagatcaaacgtcttggttagaatacattacttgccaaatatataaaataattgagaagagttaacaacttacatgtaaagtaaagcaattgatgaggtcaacttgtaagtgaacctgaattagttctgttgcattgagcactgtattttctaaaaaaagcaaagtcaaatgaaacaaaaacaaaactcccagtttttctttcactaagatcgatcatttgatgtgtgtcattataggtgactggcaaacacaactgtacatcactccaaaattatttgaatatatagcataggaggaaaagcaagcatttgaatgctaacgccccaccttgtgtccacctcaactggcagatttgagcttcctgaggggcaagtctgtcccttcctttcagtttcagggactcctggtgttggtgagcacagggtagccctctgagcactgtttagtgcttggtgacctgctgatgctgttcctaactgtgcttctccgagccacacgagtcccacggccacgtgtctcagtctagctttgtgcttagtgtctgtgcgtctggcactcttcccctccttgtgttagatacacctgttaaggagaagggtgaatgggttaaaactagaaacgacaatagaatcatgcggaaggcaagcatcaattgttacattagtttttacatagtgaaagttaaaactccttagaacagtgctgtcctgctgagaattaaatattattatcttgatttgtccatgagattgattagattttactactcttgcctttttatggtgaaattatattgatttagcaaaacctggctgcattctgtaatatctcgttacccaaatggtagtcctgcattatttcttcagtacaagcctatccccaaaataatttactgctaaaacatggttcatgctttaaaccacacagaaaatgcaaagctgttaagatgtcaggtaaatactcttttaagcgttaaataatttaggtaagtttatggtatacttattttctgtattggaggtaaatttttaaaaattaagaattctgcacattagagagaagaacagcagtctccaagcagtaattgtttgctcattgttctgtctgatgtaaggagaaataggggtttcaggtggaaggaagcctttgcccactggctgaaatttgttcctttaattcccgagtgttcttgcttctccgccatctctgtggaaccatttctgaatcatatgtcacccttccctgccttctcaaaattgcttatgcggctgagtgaaccaaaggtcacatgaagccactaaatgcaacacaacttatttctagaaacttaaactttgcaacaggatttaaggttgtatcgcaggaagagagaggggatgcaaatttaaattaaaatcatacatatacttgcatcaagttgtgaaattcacacaagtgtttaaggtaaaatgtaaaacttcaaagaaatttagagattaaagtggctattcaccagccaggaactggtgaccctcctactagaggccctgcaaggagagtcagtgtcacattgcatgcttagcagagtttattactttaatagagatgtgccctgggttagagctgcatgtgacacactctgtagtactgtaaagtagcccttctggcaattttgttgtttagttccctgacagacggtaaagtacagtcagccatccctgtaactgtgctccgtgtataagtttatcgcctgctcagcgttttccttatgtctgctaggtggtatctgagaagtcccagagcagagccccagtggaacatagatattgactgtgttggcttggataacgatggtccctataagtaggcatccgaagacagtggaacagtttgggaagtattaacaagtgtgaccttgtcacagacaagtatgtcactggggatgagctttcagggttcaaaaggccacatcatctccagtgtctgtcagtctcccccgctcaacccctgtgtgtgtgtgtgtgtgtgtgtgtgtgtgtgtgtgtgtgtgtgtgtgtgagagagagagagacagagagagacagacaaacagacagatagacagacagacagacaggtaaatagatgatagatagatagatagatagatagatagatagatagatagatagagagagagaaagagagaaagagagaaagagagaaagagagaaagagagaaagagagaaagaaagaaagaaagaaagaaagaaagaaagaaagaaagaaagaaagaaagaaagaaagacagacttttgtctgtttttctccatcttttgcttctggatcaaaatgtaagctcttagctactactccagtgccatacctgcctgcctgcctgcctgcttgcctgcctgctgccatgatggtcatggaccatctgaaactatgagtcccaaattaaataccttctttctataaggtcatcgtgttttaagatagcagtagaacagtatctaagaaaccagcctaccttctctccacagtggactaactatgtcttagtgaggcagcaggatggccacactacttctctcagagaatgccaagaaatgcttaccacatgtttcattttcagtttcttcccagtgtctcaatttgaatttctttcaaatgcttacaggttgaggcttctgggagcttggctgtggagaaatatgctgcattggttctataccatgtgcttcatataaccttttgcttattactgaaatggggcagtgctagagataaggaagaatagagaacattaactgtctgtgcctaaccataaactgtgtgaaaatgtttgagtgtgaactaaacattgtcattgtgtgtaacttctgaataatactttatactagctattttaaatacttttaatttctgatgtgcccacaacttaatacaataaatgaagaccaagataatagttggaagcaaagaaaatagacttaaaatattttcttctattttatgtggttaaaaaattacctctattcattaatcctcaggcatttagagaggaatattgactctctgaatccttcccatcatgcttattataatacaagcatctcccttgttcaaatatgaaattcattaagtagagatcttgctcgaagtatcataaggcgactttgattatctctgtattgttagaactctcattagttattgggagcttttctcctgctccatttttataataacctgcctagacttagagctccttagcagatgtctcgccatttccataataatggatctcattaaagcgtcttctaaagtcgttctttaaaggtgtggagaaagggaaaagtgactccagtgggtgagccccccacccccaatggttagcaattgctgagcaagaggcagtgaagtttaaatgctttgcctcttcggcttgttccgtgaagattttctgttaaagtcacagatgtggatcctgccgtctgtatggcggtcactaacattgtgtcttacgtagtaaaacacattgcacattttgtcagagaagtaaatgagtaagggggattggtaggcataagcacatgaaactgtggttctgatatttctagagtctccaaatccctgcccgtggaagatgtaaacttaggagatgaggttagacacataggctgatgaggtaatctggagacagaaatcaaggcctgtggattctgaccagagctgaaaggaaaagatcgggttctgagggtactaacggtggcagagacccaaaatcaagattaacaaatgatttgttactcatttccctaaactggaaagaatggcccgttctccccagtgtgaatggtttgaatgttatatcataaattctttgtattaatgccacacataatagttaatttctcagtaagtctgtctgtcacttattctgtaatggaaaatctgtatggtcttttctttaaagtctaatgttaaggctacattataatacagacagacaatgagcccagaacaagtcctcacagcagggtaatgattgttaaatgccagggtatctattcaaagcaccttgagaactgcgttctgggatcatatttaatggtggttagattctcttggtatagtgctaagcagtgtagagcagattcaaaactgcatttttggtaagtaacaagcatcaatagcaatttgtaggaattaatttaaagtttacatagtgaaagtatatattatttgcattagagagctaataagtgaaacaaattgaaaaacatgtgtggaaattggcaccatgtccagggaaacattatcagttacaaagaatgtgccaatatgcatacttctaaactttgcacattataatttggggtttctgacttttaaactctgccttagaaaaacatgatcatagaaaagtcacttctaaatttggtttcgtattgatcactgttagtacaagaaaacaatccaccaagtgtttctgttttaatatgtttgtaatagaagacttctattcttaatatttatgctgatttcagtactttaagcgatattagcggttttttgctgtgatggtgaaattgcacataagcagtgggagaagatgcttctcttacgtaccactgcaaattctttttctccctatttatttttaattagcacagttctttcatactgtcataagtatgacaactttggtttgcacatgaatttctagctgtctaaccccagggtgtcaccagtttctgacatctcacttggcgggcagtatgtagctctccgctttactaagtccttgtgaggacatttcagacagtagctatcctatgtcctgtcctgtgggatactagcactcacctgcactgttaggttcattttcatactcattaccaaacacccatctatcccagtcctaccctctggtgctcactgtttctgctgtcctgtgagtgggcttttttttcactttcacatagagaatgcacagcatctgccttttagtatctgccttagcccataggaccctctatgcatgtcaccacagatatccctgaataatactccacattctttatccattggtagacacagtgattccatatcttggctgctgtgaatagtgctgttgtacgtaagaggaatacaagacaactcttacacataatggcatcatatctttggatgcttacctagtggccgctcagatgattttttttttaaaaaaggatttacaagggggaatgtcattcaccatcccctaagtgtagcttgagcagtgactcccagagaggacgaagaccgtgacgcagcatagaaccttgacttctgcagcacatgcccgggccctctgagatttgcatagctgcttctgatgaaaagcatttagcttcaggacttcctttccatatggaagtttaaggaaaaaatatacttggttgaactgtgtgtgttttacatgtctccttgttttaaggctgatctccgttcctagttttccctgagcaacatgtggaataaatgcacagtgtgtagaatctgtttacaggtgtgagagaaacccttcagtttgttcccttggttatcctcccctcaaggaccccactgagatctcccgatctgtcattcatcatttactttaacaagtatgcagctggccttcactgtcctcctcagcaaggacaggctgttcttccctttgcacacaggtacccagcatcctctctgcttctctcctagtgcacggacaggcagaactcaccagtcacatcgccaggctcctcaccccttgcccagagaagaaagcctcagccagaccctctccagatcccccacctcagcctgccaccagtgcctccccgcctagatctcattcagaaaggcatcgtgcgctctccgtgtggcagccccacaggctcgccaaaggtgagtcagcgcctccctcgggaacacagcaggcagttctctgggctttctgtgtacctatatattacttaggcttgtttataacaacagtggtaagtttctcattttatttataccaagcctgctgtcatatcccttgctttattgctataaaattactatgaaagttatataattactcagagcctgtctatagaccccagatttgcttaagtaaatagcagtgtaaggtataatatctataaaatgcatttaaaaggtcatcatatgcattacaataatttgcgtgctgttattatcaaatggtattttacacttactttcataatgtcataacaagaaaaatgccaggggagtgtattggcataagggcttgaggtgtgatacattatcacccatgctgcaggttactcagaggacggatcatacagactgcgcttcaacccaggaaattaattacaacaaattacaatgtttgcaaagtcattattttactgtttaatattaaaggcataattttaacttaagcctacggttcattgtagttttatgcgggattctttgaaattttaatgataaagagcatgtattttattaatgtaaattcataaaacctttaatacgatttgctaatggacttatagtctaggattgccaaagagtacagcacatttagcgcagttttcttctcttacgctgtctcgaacttggcttctatcccatgactcctggctagggtagaactttgaattatatagacatgcagcaaattcttgttccttgacatttcctaatgtaaaaacataaactatttattaaataaacttttaaataaacactaaaacctcttgaggggcgtgcagagtccccttgggaggattcctcttccgccatttgtcccctggcagttaagactggcaggtgttcttcttttcattttaagaacccagaaagtcatgagtctgtcagcaactgctctgccatttagatcttcactgttctaggaatgctgttcaaactgccaaagcgaagggcccacccatatggctgccattgtactataaagaggaaaacagagaagaatcttaagactctaaatattgcaaataatttctgttttcaaaagtgaagaagcaataaaaactgtgtttctgaatctttgtgtctctggaatcacaggagtttacaaattcattgataattgccatgataatataattaatatataattgtaactttctatttcttttctgtatgatttctagaactcttacatgtatatcgtcatttgtttaaaattgttagtgtggaacattgatgtaagtttttcattaattttcagatttttcattagtagtaaaagaaacataaaaggttattagaaatgtaataatactgcattgtggctaaaatggaaatcgagtaatctgtgtctgaaggtcttttcaatgcatggtacaaacaacgtgctctcttggatttgtgttttgtcccctctctcttttagtcttctccatgcatggttagaaaacaagacaaaccactcccggcaccccctcctcccttgagagatccacctcctccaccagagaggcctccccccatcccacctgacaatagactgagcagacacttccaccatggagagagtgtgccttcccgggaccagcccatgcccctcgaagcctggtgccctcgggatgccttcgggactaaccaggtgatgggatgtcgcatcctcggggatggctctccaaagcctggcgtcaccgcaaactccagcttaaatgggaggcacagtagaatgggctccgagcaggttcttatgaggaaacacagacgccatgatttgccttcagaaggagccaaggtaagaaaatgtgcaatacagaagctggagaagcagccttcgagctttccctgggaggctttctgctggggctgagataccggacagtgtttaggtcggttgtttgtacctggatggcacagtacttcctccgtgctctttaactagctccatgttctggacagtgaggagctcacttaacgttgaacacgagggaagggaggaaaagactgtccctgtataataacgagatgcagacacaggacagctggacagagataggtccacttcctcactgttttgctgagagcctcccccatgcataactcggtgttattgaagggactaggtcttcttgctcagtcagaatcgggaatgttgaatcactgcacgtatcataaaccagtcttctgatccagtccagagtcggacctcgcaccttataaaacatgacccaattcactcctgtttgccaatcaaactattccttataatgacattcccacactcatttaaacaggaaccctctctcccctacatttagggacgaatctaagagtgcaggcatctgaagaggcagcaccagcagccattgagactagaacactgagtggtctccccagaaagcatcctgaaattctttctggtgctttattctggtgttagctgtgagatcagatctgtgtcctctccctctgtactgaaaagaatttcacctctttagctcagattcagttggccccagctttttattggctttgttaggaggtgtaatctagtactttaaaactctggattgtatttaatgtgttcatctgacatttagaaaacagcttattggcacacaggtgtaatcccaatggggatgagaagtttaaggttactctggggaactcaaggccgacagggcaacgtgagaccctgtgtcacatgaaggaaggggaacagatacaaagaaactatgcagtgccatgtacttacgtgtgtgtgtttgtgtgtgtctctgtgtccgtgtgtctgtgtgtgcgtgcacttgcatgtttgtatacaaacaccgtgatggtgaaaactttgcttcctaacatcactcctacagtggtctatcaggtatcctgtggtgaaaagagccagctctcacaggcatcatactaaagccgagagcattagttgcgaaccacagttgccagtgagctgccatagcatggttttcaattctttaaggttaattcactacagtgtgagtgtaaggagaatgcatatagaaaaaaacagtttggtaatgtcctctagacgttaagagcctgtcctcagaggacttcccacagcctggagtcccagctggagagaatttctgggatttggtttagtttgtgtttctcctttagtctctgttggctcatttgtgcatggtgacgcttgtcatgggaagagccttgaaacaagctctcatgtgaagagacatttatcctcagggtgcaggttacaagttatttctgaatgacttcagaaatacatagtgtagttgacaccacggccagttctttgaaggccccctctttcagggttcttttggatgttgccataaatgtaaacacaaagctggccttccagagcaaggctgttaactttttcagatgttataatctgaaaagtgggatgaagacttcctttgggtatggatttatattctgtaatattaacactagttctcatatagtagtaaagggttcagttttggttctgttgaggattccaactacaaaagttacctcttactgagaggtggattttcatcctatttctaatcaacctcttggatagtccctggacttggattcaaactcttccctaattttttatttttgtctcatgattgaattctccttcagaggaggcctcttttttttatttgtttatttttttaattaggtatttatttgatttacgtttccaatgttatcccaaaagtccccccacgcccccccccacccagtctcctacccacccactcccaattcttggccctggcattcccctgtactgatgcatataaagtttgcacgaccaatgggcttctctttccagtgatggctgactaggccatcttctgatacatatgcagctagagacacgagctctgggggggtactggttagttcatattgttgttccacttagagggttgcagatccctttagctccttgggtactttctctagctcctccattggggtccctgtgatccatccagtagctgactgtgcgaatgcacttctgtgtttgctaggccctggcatagtctcacaagagacagctacatctgggtccgttcagcaaaatcttgctagtgtatgtaatggtgacagcgtttggaagctgattatgggatggatccccggatatggcagtttctatatggtccatcttttcgtctcagctccaaactttgtctctgtaacttcttccatgggtgttttgttcccaattctaagaatgagcaaagtgtccacactttggtcttcattcttcttgagtttcctgtattttgcaatttgtttcttatatgttgggtattctaagtttctggactaatatccacttatcagtgagtacatattgtgtgagctcttttgtgattatatagctgagtagtactccattgtataaatgtgccacattttttgtatccattcatctgttgagggacatctgggttctttccagcttctggctattataaatatggctgctatgaacatagtggagcatgtgtccttcttatcggttggaacatcttctggatatattcccaggagaggtattgcgggatcctctggtagtactatgtccaattttctgaggaaccaccagactgatttccagagtggttgtacaagcttgcaatcccaccaatggaggagtgttcctctttctccacatccttgccagcatctgctgtcacctgaatttttgatcttagccattcagactggtgtgaggtggaatcttagggttgttttgatttgcatttccctgatgattaaggatgttgaacattttttcaggtgcttctcagccattcggtattcctcaggtgagaattctttgtttagctctgagccccattttttaatggggttatttgattttctggagcccaccttcttgagttctttatatatattggatattagtcccctatctgatttaggatggaggaggcctcctaagaggacagactctttaaggtctgtgctccattgtgtgtattagcgtggctgtgcttacatcctcaaagattatttcatgttgcaacaaaactgctgtttgaacccacactttgcaataaatattttaaaatatgatacaaagttaaagttgttaattctgggcatcaacaatgttcccttgagagtctgaggatccagctgattcttagtgacaaacactgtctttaacttatcatctgcctggcgaggacattacagatgaccttatgtagaacaatcttttgaaggaatctctagataagattgccctatgatcttcttcttgtgattataactttttgtgtgaggaagcacatgttcatgcatatgatattaaacttatctgtaagttccaagatttgcaagagctggctttcaaaatgggagcctttgtgcacacgggcctcatttgcagtgtcctactgaacaacacatgaagacatgctctctagattgtggagcagttataatcacaagatagaaaatacatttgcatttgataataaataaaatctaggcacccatgatgtgtgtgtctgtctgtgtgtatgtacatgtctgcgtgtgtgtgtgggggggtgtgggtgtgtgtgtgtgtgtattacttacacatatcaaataaatgcaaacagataaacatgtttttagaataaaaatccttttcattgtacagaatttttcctaaaatatcactctaaccttagacaatatagtcgaagtcacaggaaaagattccgaacatacgtgttaagactatatggcacctagaggcacacagaaaaaccaatgtaggagagccaggtttacaatagattgcacagcccacattggagggcttccacaccgcagacccttcaggaatggggctcatttcgtcatcctcactcagctgtgcaagtagttggatgtctgtgacacagtgagaatattgtgaatggaacaatcttaagcacaggacagtccagggcccacaagagtgctctctgatgtgtgacaaacacccaaaatatatgtagttgaaaggaaaagaagttgaaatcctgaaaggaaaggcagaaaaggaataaagtgttctacaagctggtctctaccagctgggctaacagagatggcagacaacggggtagccctccccagccctgccaccggacctccatggcaataacagaaagggatttcaagtagataggaagcaggacagtgaaatgaagtcaagggaaggaattgcagtgcatataaggataaaggcatgtgcccccaaactgggtaatacaatttgaaaccagttctggtatgacgttttctcagtcctttatgtaggaaagagctttcaaagtagagatagcacgagactaacgtgaccagcgatgcggatttttaaatggtaaatccctaagatttctggtagaattctaatggataggtgacagccttgaaggagcctgagcccagaggccagcatcttgcagactgttgtttccactattcacaaacaggtcctccagattcctaaggaacatagaatattcattttcagctaggagatggtcgtgtactccactctccactctcgggtagtgacagccaaattctgctttgatgaaatgggtgaagttgaacgtggaattcagaatcacatgttagattttgtcctccaacaactccttttcagaaacaatcatattagattcacagaaatgagtctcagcacttgtaagcctttgactgtttgcatgcttgcataatttcggtctcctaattaggaagaactacacagaatttcatgtgtggtattaagaatatgctcaactctcaagacacagtttagaactgattacagcatgatcaaatactaagcaaatgatgtgtacttttaaaataatataaagacaaggtgtcttccatttatagcaatgaaatttccctggtcagtgcctccactactgaggtcacctgccctgttgtctctcaacattcatgtaagccctattgcacatgacccatgtaagggaatttgctataaaaacaagtgagaaataaaagactgtagtctgaaatacatacaatattgcattaattctccacaaaatagaactacacttgcagctatcaaataaattgttcattaaaaacaaaacaaaaaatgaaaaaaattcttaacttttcagagacaggagaaatctttaagctacagtccatcaatacaattcatgaagccattagttaaaatgctactcacattttgaaacatactaatctgatgaagttagaaaggagttgcttaatcccctcaagttaatgccctaccagagaatgaatgaacctgagtaatagattttatgatttttccaggaaaaacaggaaaaactctgttgtcagtatgatatcactttatttttttattttactgtgtgtatgtatgtgttgtgtatgtatatgagtattcttttatatatacatattatatgcacatgcatatggatgctcatgtccacatccatcttcctttgtcatttactcacctgacgttttgattgattgattgtttgattgactgattgataggtttatgcgtgttttacctgaatatatgtctgtataccatgtacttgccagatcccctgaaagtggagttcaagacaattgtgaggctttgtgtgggtgctgggtatcacatctgtgttctctagaagaacagaaagtgctcttaaacaccgagccatatcaaatgcttctgtcaaatgcttttctaggctgggaatgtccagtaagctcttgtgatctgtcagcacagtgctgggattccagatgcacacagctgtgcctggctatgatgtgggtgctgggaatatgaacataggtcctctttcccgtgcagcaggcactctagcagctgagccgttttttgcaacagatttccctttgagaaatttagtatcacacagagatgttgtgtgaattgtcctatcaaagtatcgctcctttatcaaggttgaaacatgcttttatttccatatcagtagatgtttgggtatattgacattcctgctcaagtgtgctcataatgttttgattatgaaattatagttggcttattgttgaagttgataccatgaactcttatttccatatcatcctttgttactgagctcttatcaagtagtaacgtgatagatattattaccgaaaaaacagcttagtccacatttttaaaaagaaatcctttcattttacacaacttttaagtgtaattttgataaaaatcattagattttattgcaaaaatcttagcactatgtctgctcagtcaatgagaagaattttgatgaagaatactttcaaatgttcaacactataattggcatttatagctggatgcatgtattcatcagataaaagacaatttttatgttaaaggatttcattgaacctcatcatgatacatatctcttaggaaaattctcttctctagcaaagttcaaaaaattttgtcatgttctgatacatggttctcagtcaaaagcccacgataaaatcacttcatttaaagatgtgttttatcaggatgtaactgcagcgcgttgaatctaatgaggggagacttgggaaagaaaatctgaactaacatagtcactcgcttctagagtgaaatttcaatgctataaaattggattttttacagcagatgagagcatccatatatctcagaggtgatcttgcagtctgctgtttggtaggatacccatggcctttgcaggttttcattttaaatcctcaccactgtttatataaccaagaatctaagcagtggatctggatttatttagccaaggtacaaaaggtacaactcacccatcagggctcatttagccaagactactaaaaatatatctcaaccatctgggctcatttagccaagactactgaaggtacaactcacccatctatccctagtattcatctcccttctcaatatgagttaataagagcttatgaaagaaagaagtttattataaaaaataccaattcaattcattacttacaaactttaagaggtccatagccttgtatgcctttgcaaagttacccttccatttcttccaccatttaagttgatccagttcaagactataagagaggcaaggaacagttggccaggtgcttccaccagcattaccactgcgcctgtaaaccggaagcccctgatccccactgataaaacgttggctctgagctttttgcaaaccaaaagtagatgtgggatttccacacacgtggaaagtcagaacaattggctgactaaaatggctctgaagcttggcttggacatgacacaggcctgcaggggtctactcataccctgtgacatcaggaattgaagatggccctgggagccctaagtctgtttggaggcatgtaaaatgacagttgtgtccacatagtttcttcctctagccagcccctattcttgtgatataatctgatcgttcctgggaaattctcaattggatgtatataaattattgccttgcttctccgttgtgtttaaaaatcataatgtaacatcttttcatataatctgtgatatggtagatcaccactgatcctgctgactcctgaataaattgtatggtattgcactagtctaaataagccaaaattatatgagctctgtgaaattctaagagctgctgtggtttcaggctttgccaggagttgaagtccaggaactaacacctttggtttactttcaggtcttttccaatggccaccttgccactgaagaatacgatgtccctcctcggctttcccctccgcctccagtcaccacccttctcccaagcataaagtgagtttccttggatttggagatcgtgtgtccatacctaatataggaaagaatgtttttcaggttcttagtacagcaactacagggtaaatagaaggaaatcagtaaagacagaagcggtggaattgggtttatgacttcaagtatcagatggtaagacttctgcttctgggagtagctcctacagacttcctaaactcctgagaagatgaataacagaacgaaagggcaagaaaacttagcctaacctccatcgaagcagagggcagagcagcacagcaagctctctactccagccttcttctttatgactttatctcactacccaagttcaataaagttcccccaagttccctgcttttcaaaactcttcagtgcccaagatctgtgcatgtatccccatggagttttttcctatccagttaagcctccccttgctggctcagactcagctagacttctgagaatgtcagtagatctgcattgagttgggaccagtggacataaagctgggaattggggccactgcatgctggacagtgaggtaatgtccagccaagttgccactccttccatttccatttccttctgagctctctgtagcagtatgagcctacagaagtttagtcagctagaattctcatctattcctagtgcttgcactatgcagcaaccaagccccgcctatcatgttccaccttttcctcaagttctatgtctcagcgtttgcttttataaaaactaatgtgacttgtgttcaataattaatagtggttgacaaagcagagattggcagtatatatacctataatcccagcattgggaagctgagaccaggaggatcatcattaattagagtctaccttcagaaggatataatgagtgccagggcagcctgcgatccagagtgagcctctgtatcagaaaacaatagaaaagactgacttgcatttttcttgttacaaattattgttcttgatgtaagtaattatgtactctaattttaaaaagattggatggtttgcaaatcataaacaaggtttatgctttcaaatactgccagggaaaattattttaaggggtgtgttgttgtttttgttgtttttgatggcttggtttctatctactaagactgccaggtttttcttttttcttctctgtttttaatttgtttctttttctttctctttttttctctgggagtcctatacatgctcagacagcgctctctctcaggtgcatcactaactatgcaaaggccttcttttataacgaaaagcctccttagaacttcttcattcctttccctggaggtccttgagtttccattagatttataaaagaaagaaagaaagaaagaaagaaagaaagaaagaaagaaagaaagaaagaaagaaagaaagaaagaaagaaagggaaagaaaaagctaactctcaaccttccaggaatctgatatgctctaaaagtaatcttttaacatgtgtgacatcacaagagaacactgcaccaaacggtgtactgctcattgactagggtttttggtttttttgtttgtttgtttgattggtttgttttggtttggtttttggtttttggttttttgtttttttgtttttttttttttttttttttttcgtcctttaaggaaagccattacaaactgcatcagcaaagtgtgtttcatagtcgggacagaaggagtcactgaagatgggcacaattagatactgcagtgcctgaaattaaaccagagtgcaatttgagatccttgagggaagagtagagaagctgagctgagacccagcagttacaatcacgctgtcatacagtctaagtctgtgagagcaaacctgatagtgcaggccttgcaaataaaccttaaagtgtgcgcatacagtaagacatcgccgctctataacctctacagtcagggttttaagaaacaaattactgagatggtccaagttcctgatcagctcccccagccctctgtttctttaattcacagagtgaagtatgactagagaaggggtcttggttttgtttgtttctatttggtccttttataattagcatgaatggtaaattcctagtgaagtgcactcactggtaagtttgtaatgtttaactctgcaagaaccactaagatcgggtgatattttctctccactttctaatttttttctcaatattttctagtttatactaaaaaatattttaacaagcatttaacaagtatttttatcagcaacttagttaatttgcatgttacatattagccatagctgtaagcattagatttgtattgtatgtttctcttcccctccccacaactatatctgtagaaattaagtaaagtatataagaaaatataataaaagaaaaggaagaatgaataaaagaaaatatataaaataaaataatcctaacagcagaaataaatactcaaaatatcaacatccaaattttatccttgggtcttttgtgaaattgagatttattttaacattatttagttcatttgtggagatgacatcacactctccttgtcctttgatattgtcacatccatttttttttcagaatatatatactgttttttctgtgaaatcatgaaattctgaagtaaaatctgcagtagagtaaaatcatgttgggttccatgtcttaccctagcatttattaattgccctattttgaagaaggttccctctctggacttttggcttctatctggctaatacatgagaggatatgtttaacttaaatgttacctaaaatcttttgagcttctgctccctatgcagcaattgttatgaattattcactatatggtgctaattttattggaaactttggtgacctgaatgctctctactatagctggttgaccacttcctattgcagaagccatcatgagatgaactatcgaccttactaacattactaatatcataatgcgtataatactttcattataatcattatattgttcatattattattatagtatctgatagaatgttggttatgaaattgtactactacataatatccatgcaatttattattaatacagctccactttgacccaatggagaggatagtccatgtccaaggagcatccatcataggaggatgacagagcaaacacatatgctcactgacatggcgctgttagacattcaggtccccattgccatcttagattcttggtccgtgttcagacatcaaggcaaaggaaaattacaaatcactgtctaaattaacttacagttcttacaaatgttggaagtcacagagctgcacataagaataccaggctagcaattatcttttagtttcaactccagtgatagtaacagttaggaagatatgaattttcggcatttgatactggcccttgatgcctattttcttgagggcagaggatatcctgtgaggtttccattcaggccagtcttcatctgggtgattatgtgactctttctacacactttataatttatttctgaaaatatggtatcataaagtgatagtgaaaagaaacagtcgctgtttgaatagatactccattttctgaattttttaaaaaatagattctacataacattggcactatcaatataaagctttaagtaaaaacttgaaatgtagatatttattataactttttagaagagagaacaaaaagttccttgtgtattattttattttataattaaattataatgtataatatgtactttacatatatatgtagtattttattacatatatgcttactaaattatatccaactaatttgatttttaagtttaatgagatggaagactaaacaattgaaatgtttattgtccttggcacactatactatcaaatgaacacatatgatattatagataataaggtagtgaatccatccaagtaaaacaacactgtagaaagctgaggaataatttctttatgctttgctgtttacatggggacaattgtagttttggcatattaatcacaagctgtcgaataccttggaaccaaagctacttggttcatgcttttcctaacggtcctctgtcgtgggaggtggtgacgtttgttgttgttgttacacatctcttaattaaataaggtactaaatttgggaggttcgctgaaaagaaaatccaatttttgcccagctctctagtttttgttctgttgctgtgctcagctgagacttgcggggggccagatggggcaagatccaactcccttccccttcggaatgggtgctctagttaaggaaaagaaagtgagaagaaagtcagttaaccacttagcggtaatctccggtaggaaaatcagacgtggggcaggatgactagtgacacacagactgtcactctagatgtggtcctgaggaaagacctctctgaaaggcgcttttaaagcagtaaagcaagggagagagcccagctgtgcgtgaaaagcctgaccctggggcaccggggtgcagctgtcctagctgtctccaggttttcagcaaatctgtgagatcgctcgcagtcaaagcttagtccaaagctgcaggctgcagcaagctcaccttttcctgatagtgtgaaaagcaccctctcaatcattgtaatactcatgccagggttttgggcaaatgacttgtgtgctgcagacacaagataatcttgtcgaacatcactgtttgttttgctggctctttgggctttggtttgtctgaattggagatgttttctgttcaggtaagaacagtgtagcacatgaaacatgaaataaaacatggcagcttgagcttttatttaataaaaacatgtatatctttactttctgccattagttgcttgaacagagatcttctgatatgggaagcaagtaaaatggcatattatttaaaatgcttttctgtccatgaaaggttctgaaaattgttgctctctctccttttttatcggcatggtgattttccttgctaataccccctcattatttttatttaaaagcttgtaagtgctcagttacgtgcaaagtagggtaatccttgatggcctcaaggtcttcccttaaacatgttgcaattgtagacaaaaacagtaaaataacagtataggaaacacatcaatagaaggacatatgctaaatacatataaccgaaaaggtcaaagaaaattactgaatttgttgccagtttcatggggatttttatagacactgaaatatgaaggggtctgctttttgttttcggagaaaagttggtgtgtcaagggttgctccaattaggaatgaaaaccacttgaagagggtgatatttgaggtccattatcaaagtaaatggtaatggcatgtgcagtcagtctgccctgtggttattctgggagtaggcagttcttgggaggaatatgtttgtgaaccttcagctttgaaaggtggcctcagaaagtatcaccgtgatggaaatagacctctttctcaacatggcgaatgtgcctgcacactcaagccagtgagtcaccatgaggataggaaggctcagatgagtttcaagttaaggggataatggttttgcaacctggaaaaatgtacctcctgtgctatgactcaggaacagcagcagaatggaagaggtagcaggaatgtggagtcatataacagtgtaaatgtgtgtaaatggatgcaaatggcttggtatctttcctttggagccagccagatagctgtcctactttgttcctccgggaccctggaggaacacaatgaaaataatatctttcccttaagatataccagtgactgactgagtctccatgtccctaagtccaccatctagataacatacacacagacagtgactctgtgtctagttatgctgacacctgttgactcataggctatacaaaagtttggatacaatgcatagactttgggtcagcttgatctctctgacttttttatttacaagttctttatgataaaattttaataaatattaaaacattaacctaagagaaaatagtgaactttcttacaagactttattaaaatgataagtagaaaataccaggatgggctggtgagatggctcagtgggtaagagcacccgactgctcttccaaaggtccagagttcaaatcccagcaaccacatggtggctcacaaccatccgtaacgagatctgactccctcttctggagtgtctgaagatggctgcagtgtacttaaatataatcaataaataaatctttaaaaaaaataccaggatgtattttttatatttcaatacaaatggcacatagctttcttaacttctagttataactcaccaagatccattcaacctaataaaatgtctaactagtagcttctaaaactgaacccttagtttttgataaaatgatagataattattgcctttcatatttacatcagatgctctctgactaacaaaagagtgagtggtatttagccaggcaagatcttctgtcaatgaagggtagcatccagagctaaccacaacaggtgtggtttgtttgtttttttttttaattgtttatttcttgcactgacaagatggtttcttgctacaaggtctgatcacctgagttgaatccctgggaacggcaagataggagagagtaagaactgattgccacaagttgtccttgacctccatccataccttggcatgagcacacacatcccaatacatactatatgttatgcaaattaaaaacaagtattcttccttcagagtgaagtgcttcttggaaatcattaaattattgaagtaacctgtaagacagatttgaacttccacctcttgatgtagttattgaatattaagtcaaaggtcccttttgtctctgaagtatttacttaagtggtatgtatagagatggtgttcactgagactggaagcagagcaggatgaggatgggaacatgcagggcccacttcctctgcctatagagacgtcctggtctttgcagaggttggtgagattgatgtctgtctccaagaatttagtgtttgcaagaaaatacagttatttctatcctaaccatattaaaacaccatcaagtcatcattttgaaacatctttacttttgtcacctttagttgcaaggtgtgtcttctaggattcaactagagtgactataacactattgtttgtttatgaatttcatagcctgtgttctgggctgtgtagagacccctctgctactacaacaaagcttcaggttaccattaactgacatttggatcctgaagtatctcttaacaaacagagctttaaaaatcaatactgaaaacttcttcaaagacaaactaaaagtataagcttttgaaaactcccaagggaaggttttccgtgatctctgaatacagttgaaactttaaatatgagcacacacatacatgcacacacacacacacacacacacacacacacacacacacacacacacacatacaaaacacctctgacatttttttctattataacgggtgttcagccacactgacccaaaagtgaaatcattatagaaagttctccaaaatccaaagcttttttgaggattacatgagggatacgactggtaaagtctgcaactgttccaaaatttgaggggaaaaaataatctgaaaaaatgttttagtcccaagaagttcagacagggacactcagctctcggagagaagaatacaaaatgaaaatgaaactttgtggtgagaagaaatgaaaatggaaaaagaaaaaagacaaaaagccacataggcatcgactgcctcacgtaccagagggctcctgctccctctgccgaatgtgctggaacattacactgttttgtgttttttttttttttttgggggggggggaacattttccgtgaagtttataataattaaagtggcttggatccgagtttttctagtgtcttgcaaactagctgtctttctacctgttggccaagttgcattttaacatttttttttttggactgttgtcttgggcagtagcaaaggttaaattaaaacccacacaggaagtagagtacttttcaattttattttatatattttcccaaatgatcaagtaaaatgctcaaatccaccacggtatcccgctaagtgttttattcgttgcagttaggtattacacttaggtatcatgagttacaaaaacaatccatctcaaagatttatttctgtcatgatcggcttctaattgtggacacgtttcgttcttaattgttgcagtgggaggaactctagcactacagttataagttgacaagatagttaaatttctctcatgtatggcttttttaaaactatgggtattagccatagaccagtttgaacctttaaagaacctcttgtttccagttgatttcagtgtatccttatcacttttgctgatttccagtacatgggagggagcaattaacattttaatagcttggacttgaataattgtacacatcttatgttaaagctttatttataaaaccctttcattttcgtaattttcatttttttcttagttcacccttaaaaaccacaggtatgaatatcttatcttaacatttcaaggccttccatttctattggatgtaagaacagtttacagttgaaaacttccagtgacaaagcagtttcttcattgttctatgtcacatcagaccttcctgctctggtatttatgatgcttaaaccagattggattttcttttccctcttggtaggtgtactggtccattagcaaattgtctctcagagaaaactagagacacggtagaagatgatgacgatgaatacaagattccttcatcccatcctgtgtccctgaattcacaaccatctcattgccataatgtcaaagctcctgttcggtaagaagatgagcatctctgtatcatcctgcatcggcataagcatcgtcatgctgtcaaacgtgggggttgtttctatgcggttcaatagtatgtgattggttaaaaatcctgttccttgcctagcctgtagttcctatatatttccttcattgcttccacataaaagattttgttgccttcttccccacccccacaaaaggccaaattacaatctaataaaaaggagctatacgttacatataatgatgattaattcatgcatttcccctaagatattttaatgaatttcaaaaggtccaagcatatatatcatgaagaaatattagtgcttagaaactaatattaaggtactaggtcaacctgcttaagaatttttcttcataatgtgaaggctagaataatttatattcattttccttcttgatatgtaatatacttctactgaaatcataatacaatgggggggaagccttaacgttacttctgttaacttcttttttgagcaaataccttctcttgcatgagctaagaatacaaagatcactgggttttgttgttttattttgctgtgttttctttttctttttcccctcattataataggagcattattggtcttcaaagtgccagtcacattgacttttataagaattattgataatggcttacatgttttgaaatatgtttgtctctaagcaaaatcatggctttgcatgcatgaaacttaatacagttacagtaacatttatataatttgcatcttactgacatgtcaatctattagctttattttctgaacttattttctggcctgcattcttcttgcatagtattcctggagctgtgcttggctccaagttgctcagctctgttcagacactgttagtggctgagctgcctggggcctcctgatgactgacagataggagactgcaaggccatcagtcatccacgccatctttactcagtgtgctgcttccacttgaggccagctcagtcgacttaaagtattttatgagtagagtttccatctttggagttgaaaacgcttcccaggtgtctcacagaggtagagaaagaaattcttggaaaccaagagttgtgcctccaaagggatgctggtgggcggagttactacccaggctaagtgatgcactgcagcccacgctttccctgattacagcaagaaccagctatctcttgttaatcgtgctgatgagtgctcctgcaaagacgataacggagagtgttaccctgggagagccacgtgcccgctgagctagctgagggaaagtcacgcttgctcatcaagtataaactgtgaacaaatcccagtttctttggctcttactaatttagtatagtaatttttaaatgctaaaattgaacgagatttttttgggttctttgggattctcattcttctcatggctggaagactgaaggatatgattttaattcatcaaattttaattgtcatgtcacagtagatgatatttaagtggctaacctcttggatactgaaagtcaatttgaattataaccatcataaccaagtccccacagttatagagaaataataaatgttgctaattcctaagcttaattgtaatgaatacttgatctaatttgttcttgaaaaccagtgagtggagtggcacgttgtgtcatctgcaaagtccccccacccccccttagaacttccttttcctggatgtcactcactccccctttggaacagcaagaaaaataaattgtcagtatgtgggaagtgaaacagtaaatgaatcattcaattcatatcatcattatgaagactcaatacgtaactgttcttaaatgaaccatatcgtgcccgttaaaaagaaatggccaccagagagaatagaaatgaatttcagatgaatcactctctcaatatctactgaaatatcgactatctcctccattatgaatgtagtttcactttgctctaagaaatcagactaattcaaaaggaaagtataaaacttcactctctctctgaggctctttgttagccagccgttactaagctaggagcttaagggcaagtgtgttctgtgccgcctcccatgcctcagtttcatccagtcttgatggcagtaccaaaatcacggcttttaaatgagctactattttcccccatattaaaccatcttggtgatgtgcacccaaagcttttgctgacatcacttccctaaggtgtcagagggccagcgtttattaaacatagtggttagataggttcagaaggagtaggtcttggagtgttccctgcagaacttaaacgaaattgtccaatgcttcatagtggttcctctcttttaaggccctttgaatttcaattcaaagaatgcttaagttgaaccaacaaacacattcaatgccatcaacaaaaatggaggcccttagaccttacatagttttcggtagcgtatactccgtcacttcagaactctggccaggtgtaactaaaatcgtactcaaatgtgtttagggtttcggctgctttagtggccgtaaattgcagtgagagaaagagagagacatgtttcccttcagacgaacacgtctgattttaaagtacaggtcagggtagctgcatgttgttactagtcctttttctagagaagataattgtttttgttttgtattcttattaccttagtaggaatgaccgttcgctctattgtcctcccctcacgcccgccatgacacttaaatgattcttgccctctggtctccacattaggtcttgtgataatggtcattgtatattgaatggaactcatggtgcgccttcagagatgaagaaatcgaacatcccagatttaggcatctatttgaagggtatgtatggagtatgctttcctttgcaatatacatcttagtggcctcaacctaaagggagagttcccttgtgttttcatactgagaatgcattaaggttttgtgttatcctctaggaggtggttctgactcagcctctgatccagtaccgttaccacctgccaggcctccaccccgggacagcccaaagcacggctcttcagtcaacaggacgccctctgactatgatctgctcatccctccattaggttgaaacgttaaaagcagtttaaacaaccctgacctgctctccatatctgcattattcgaattaagagttcaatataatgcagactcttagttgagaattggcctaaacttagttgggttctctggttgatggtggctcctgcattcacatgacatcactctaacagatgaactaattgcataggaaatagctgggaaattttaagcgattttcatagcatctttcagagtttttaagtgtctgatttttctgcaataaggcgctgcttttataatcagagaaaaagtacttaactttgttttaagctacatttccacaatcttatccttacataactacaaaggagagcctggacgggcgggcgggcgggctggctgccgccagcagggatttcatcagttctctcatctagaggcagttctgtgtcaagacccaagagtgttgctcgctcccttggcctctgtccagaggctttcaagtgcggttctggagctttaaaccagggccctccaaatttactaatccttagtaaacatgacccacgctctgcttcagcatgaaattgctgggccctaacttatgagaaaggatatacttcatcctagaaaacacgaactagttctgtttaaactgtttataagcttttctgaattgtctgttaggctgctagaaatactaagtgagcttttatatttctcatatgcaccccagaccagtagtttgagctgtcctattacagtgtcttttgcttctgatttattgatcaaaggttttcgttttgttttgttctgtttctcctcttgtgcttgaattctacgttcctgtctacagtctggtttccttatttgctttttctctatactggatcttgacccctcactcaggcccttacgatctagatgacagtgtttaatagagtttgctgtagggctgtcagggacctatgtgtttgcttctggtctagttgatttttttttcttgtccaatataatagccatggatgattgatgacctttctgctagctattcccatagaagttacctcctacctcttctcttgggccttcctccagcgtggcctgcgtattggtccttccttactgttctcttggctaagcacaggcattacctgtctttcctgcacatgtatttttgaacctctgatgttccacttgatagcagcacttcactggatgctgcttgtatttttcttttctgctctcataaattctcctttatgaggccaattaaaccctttcacctgtcagtcttaagtgtttgcgaacaggttttcactccccttgatagtatttaagctccttaagttttgatcttcatatcactcaattcctagcatggtgcctgatacttaagggctggaaaaaagatttgaatttaattatgtgacagcaagagcctgaatgataacaaatctcttctaaatcttcaaatacttaaaattagaaaaatatttgtgatgattagatcaaatattctgcatatttttgcaaggcaagcacaatgataaattcatttttatgtatttatgtcaaattcattctgcttaaatacatgtgtatttttattattagaatgtgaaggtgtttacgtatagcctgtctcactgacagcatatttgatgtacatacttgcaaattatatgcagttcattttatttttttaaagattcaaggtaagaaaaaatctggtctagcaataagttgcagggataaatatatagacataaagtcacactgcagtattctataagcattgaataaaccacatatatattacatatacacatgtgggtaactagctttggagccacctaatggggatctccattgacgtgttcttctctggagatgacaactaagcaaacagtacactctgctgcacttgtgcgtttgctctatatttttacagtaaatcaaatgtgtggtgctatataactgaattacagtccagtggaacaagtgttatggagtggttagacacgctctttgacactaaattacctgtgcatggtgtgatttttctcaggagaggccatgaactctctttgttgctcagagatttcggtttggctggttttactgaaaatacttttcagttcagagttctagtatactaatagggtaaacgtgacaaagggacagtgagctgatatgttacttgcaatgctgctttttatagaaagacccaggaaacagaaaaatggtttcacagaggggtgtttcattggtgtgtgtgtgtgtgtgtgtgtgtgtgtgtgtgtgtgtgtgcgcgcgcgcgcgcgcgtgcgcataggtacattcgcatgcatgtgtgtgtttatatgcattttctatcctcacacccacaaagcaacaccattctgtaagtcagggaagtgctgaatccaccctgcaagtgaacttacttgtcaggtgaagcagtaagggaaaaatcagtcataatttttgcttggcactgtggtttgattaatgaagttccactgttaatagtgctccttcttgaaatgcaggtgaggacgcctttgatgctctccctccatccctccctcctcccccacctcctgcaagacacagtctcatcgaacattcaaaacctccaggctccagtagccggccttcctcagggcaggaccttttccttcttccttcaggtaggagtgagtgaaaagccaaagagggggacaggagggggggggggggacggggctggagagatggctcagtggttgagagcactgactgctctcagccagagctcctgaattcaatccccagaaactacactgtggctcataaccatctataatgagatctggtgccctcttctggtgtgcaggcatacatgcaggcagaacactgtatacataataaatacatctaaaaaaaaaaggcaaaagcagcattttcttttagagcaaagtacatctgagatcatgctctcaaatttatgttattgtttcctgagtctctgtcacattagcagaaagatttctggatagtgagagctgtgattgcctggtttgcttgacaccagatcgatttaatgaccaaacatcacaaagatggcagagcaataaggaatcacagtgcttgcacatgacccagtaaacaactccacacccaagtacatatgggcaataccgatggaatttagtgggttatttaatactgtttaaaaggagagatgtaaagtcagactggagatgtgttagtggagcagagttgaaggttgctaggttggaattggggttgagttgtatattgtacattgtgtacatatataaagttctgaagcaaaagaaagatcggaaggaccgagggagcatgctctgcatattatagagagcaagcgatgccttcagatgacagcagagttcctgaaagacatatgacagtgtgatgggccaataggagaagcacaatctttaggttctcaatcccctatttccagtgaaatgtttttctaataacggacttcaatattttttttcaaggtgtgctttaataccctggttttattcaaagcataaggttttatgtcctaacaaggtagctctcctaaatgtttgtgttaacaattttaagcatggagatatattgtcttcaacgggaaacaaatacagttttctattagtgcacatctgtagagtgtggagcagatataacaatgaagagactaaaggaaaccctctgcacatcttgggcagaattatcagaaaaaggaaacacagccacacatgacagcaggctattgctatcactgtctccagtctccccagtctgcctggggagaggtgtgtggtctgtgtgccttgcaaggctaccctcctggactagctttggtaaagcagtctaggtagacgtggagggacatggctgtaatcccagcagctgcaagtttgaggcacaggactgtgagtttgacgtcatcctgggctataccagatttgcctcaagaatagaaacaaatgtttttaatgttttctgcacatttccacataagataaatcatgggaaatcttttaagtgttctgattgttcattgcttcaccagtaactcattgaaagtctgtggagctgttaatttcccctccccatccctaccaccacgaccaatggctctgttttcatcctctctccttcgctctgcccccactgccccacccccactctgctttacactcttctctttctcacctggtttgataatgtagagacattggagagagttcatgaaacacaaactctggtcacctaacaacacatgtcactttgcgtttcaaggggctgaatatggaaagaataatttccagttgaggttttcaacagcagttgtcttgtctagtgtttggttcattattaacgcatccttccccccgtgctcatggtttgccagggtgagacctaaggccaagtgtcctaaggtcatctgctgcaagcaagagttaagacaagcatgcagccacaactcttgggtgctgagcttttggcagcttctggttagcatcctcctctagcttttgtaatgtactctcgatttaatacccgactggtgaagcctctgtacagtgggctcccttacaacaaagtcaaaatttctagaagctaccagaaaatattttgttacattttacaaaatgtgtgaccatttttctaaagaaatacagtggcacattgctagtggtaattcttcactcttaagagtaaaacttgatgaaagatatacttactaagtcacagtccagctcactgcttttacaattgtaaaactgaacaaaggtagctgcccaactcacactgcagcagctacgacggaagtctccctcatgcccagtgtttttaattaattagtggactcataaattattttgcagtgttgagatgagttccttgaaaagtatgccaacgtaagggcagaatagatatctcataaaaggctattgcattttctcagactattatataaaatccccatctctttctgatagccgtctacgccctgcacagctgagtcagggtgccagcctttccactgctccagagttcagctttcagactgcagagccgcctttctgcagagaagcctcatgagtccagccagctagcagaaggacagccatgcagagactcagctctgttcatcctttgtgtttcccaccttgggctttcacacaagatttcttttggcaaaattataattcccactaacgtgctcgagccttccttttggacgagccaatcaaaacttaacaaaaccggagtcctcaacaaaagctccatgatttcccgtccacaaacccaaggcaactgctggcataggtgcctttttctctttgtaacaaaaagagaaaaaggcagtctccctgtgtgtgggaaggttgaaataggcatttctacagttttgcttaaggcaaatagggcatgtgcttaagcaacaagagctaggaaagcactgagtcttagtcccaccctgcatggagtctttgggaaggacccaggatgcgccccaggcttcgcagccctacctcaccttcctctctttccctgtaacctaggatccccaatattaacatctcaattcaattttaagatctagtgacgttattaaaggtaagcagtactcttgactctgagacatgaatattcatctgtataagtaaaactcaaaggaaaaggatgcagtgggcatcatttattcaaccctattgagacatcatcaataacggggctaatcagagagctcgtgccatctgcaaggttgacagaggaatcacataagtgatgtcaactgcggtgtccttcccgtgtggaggctgccatgttcacatgtgagaagttcaagggcaagaactgggctcttgaaactctctctccagctcagcagcagcctctggggatttgctgtaagaagtcaggcaggacctgcctaggctgtaaattagaacgactacatttcttcttagcaaattgaacacattgtgtgtattacattctcgaaaaaaattatattactgtataattacacatgggctgtagcattttcaatttgtgtgttttaatcataaatatggacattggccttacttagttttaaacgaatttaattcagcaaagctttattgattttcaaatttcccttatcagaggacagctagtaattatagcactctgtagtaattattctatgtcacgccatcccctttggaacagtagctccaattccatggctctcaacagggagcatccttctccctgtcccttaccaggaacaacttggtctaaagcgaggtagagcatgtcatgatggaacagattctaagtgggtttgctgctgatttaaataatttattgtatccagtcccttcttaggtaaaatggtttaatgggaaaacatttttaaactgcaattgtttattttatttaatttgtttataatactaaaacatgtccagattttaatattctacgttttcagtttctctgtaaataatgtagaaatgtccagtaagcctgagttttctctagggtataatgatatagctaaactatatatacttatagcccatctttctttatggaaagtatgtgtttgcatggatttatttttagtagttacaatatttattaagagcaagttaattgccaaacagtttgcctgttgctgtatttaagttaagagatacagtataattaaggaaaattctgccctccaaggaactcagaataacttcagagatagtaccagcagaagaaaatagatgcagaaaacatgagagtggaggtgaaggctgtaaattattagcgagccgaagaagtcagagataatgttcttctattcagacaagagtacacactaaggctttaagcccatatactgctaattttaaagcggttaggcccctgtggtcctagtgacttctgacaacacagactcctgtctctgtttagttacatttggtgaactccatcacgtatagtgaaataagttttcagtctactattcacgcttcacagttttacatggcagagtatgaaagagtacatttttaatgtgtattcaatctttatttttagaaatgctgtatttttcgcagttgaattaactattcagtgagacaacctgagaacttggtcttagcatattttgggatgtctaatatagtacagtttttaaaataccttatatttactgatttttgtacaggcataaattcatttaaaaatcgcaagcttcaggtctgtttacagattcatcttgatgtccacttcaggaatccaagtgacccaacagttctctcttaaggcaaagtaggcagcattttcttcaagttttttcccctcatcagctttctttcattcattgaaatgcatgggtagggatagaaatttgagttaggaggaggttcagtaagtgatctgcaaagatgaagaaacaaccatggtcttagttttggaagtaaatggagtagctctcgcctgaacaagtgaatgagtttgaaagctgcacagtccatttgggtattactgctcatgaaattagttgaccagttcctcatcaaaatctacagtcctgagaaaggtcccagaattctttcttcagccaaccagctgggatcattgtcttaatttttttaaaaaatgtctttatttttcaagatcccttttttgacccaacaagtggccaagttccattgcctcctgccaggagagcagcaggagacagcggcaaagccaacagagcctcgcaggactatgaccagctcccttcatcttccggtgagttggctgagaacagtaacaatattgtcctgtgtttttacagcgccttttctctgtagcctctgccttttgtttattgcactatacctaagcattcacttactgtccatgtccttagtatttggcatgtaaagcgtacattatgaaaacaacactcagaaaaatacctgggggaaagaagaagtgaggcttactattctgagtgaacagtcagtaaactcacagtctttattttgggatgcattctttcttttgatttccttttcttatccagataatatccttgagcatctgcccttactggttttttgttgttgttgttgtttttgttttgttttattgtttttgttttttgttgttgtttgtttaatttctcattaagactgacaactctctaaaattcatatcagtaacaaaccatgttactgttaattgtttactatgggttttttattgttgcttttgttgctcctaatgttgtggttcgttgattgattagttggttggctggtttgctggttggctggctggctggttagttagttgctgttagggtttttttgttttttgttttttgtttttgtagtgaagtgtgggccttttttatctgcatattaatccctttcctgagagttccactctcacaacttactcagctactataaaggcctgaagatagtgtggccctatgccttgctcttgtgtttgttcttcaggcctttatccaactaaccaagcaacaagccacagcaatgccagcacttggaagctgagcaggaaccttacaccacgtttagcaacagactgagctacacagtggcataggaaagccaagaccagtgtggcctatgtagggaaaccccatctccaaacaaactactcaagtgagacacaaaagtattcctgtatctcagttctccttctggatgcccaacgcataaattgatggggaccgaaagaagaggtgctagatgtaatagttgcataatgggactctctgaatcattgagctgctttgagtattatcagcactgtacttttccatagtgctgtgtaggagatgcagaattctccataaaaccacaaaagtgttaacacttgtatatgacctgggaaagcacagaatagtttaaccctttcagattttggtccatgttgtctgcctgatcacatggagccactcagggctttcagatccgtctgtgtatagactgtagttccaaggagactgacaaagcatggaaatcaaggagggaaaatatctgccagccccatgtgacataagaaagcaaagccattactgaaatattgttgaagtacacctttggccaaaacaccacgtctgacttgaaataatatattcagcacctctaactcttaaaataatggtattcattcacatcatgagtcgagtcatcactaatcactgttttcacaggttcttctctgtgggctgcacaacatgcgagtattgtggggtcaatagcatcattcatgtgcaggatttcgagtgttatagattggggttgacattacaatagaaacttcaagagtgctttgacttgcaaacagagaaacacccatataacgggactaaactaggatttacgtaagaaattagaaaataattctaataatcagagccagctatagcatcaagtatttcatcctacttcctaaaccttttctaacactagcaaagcatgggactggtgccctgtgttacacactagcaaagcatggaccaatgcctctggttctgacctgtgtttgttagcaagaaacatgctaggttttggttggttggttgggttgggttgggtttttttggggggggtgttttttgtttctttgttttttggtttagtttgtttttttgggggggttgtttttttgttttttttgtttgttttttgttttgttttgttttacagatacacatctgtactagcctctgaattaggagttctcattttaaaacctgacctagatactatgtgccttcacagtctcttcttgtcaaaggccctactaaatggcctaacaaggattctggtgtgattgtgaactctaaaaccaagaatgtctatcatctttcagagctacataaataagtgatagtagcttactcttccatgaactatgaaaagaacagttctaaagattcagaaacagtgttatcaatataaaattatgttccttgttcatctgtcaaaacatcatgtgcgcaagtgcatctgtatagctgcgatgcacttcaagtgcattcattcctctcaaaggaagtatttcatagatttaaaaaagtgaatgttgccatcgatatttttaccaaatgattgtgtgataaaacacatttataaaaataaaaataaaaatttcactggcttattttaaaaatcacatacttctgggttggggcaactttcctgccagtaatcgacttactctttatacaagcacattactcacacatagcttgtgtcactaatagctatgtgtaagttttataaaattttgatgccactttccacctaatgtatattgtgctgcagtttgaattccttgagcattccataatgcctgttcttacatgcagcattacccttgaaggagattattcatatcattagtagttaaaaggtacttcaaggacttgaaacaatgctaagatgtctgtgactcacatgaaaggattttatttctgaatatactgacaaattaaggaggtgttgttataaggggaatgagctgcagtgctgtgtcctttgtttattattggcttaatggaaaattgaagggctgttgaacagattgttatatgggtaatgggtttggaaatttcagctggaaatcagagctgtaattcacacaaggtgtagagaactgtttaagttattggtagtcagtgatgggtagtttgccattaacactcggttcggattccaggatgggaatgtcagtgtcgttgatctctaccagttcagccggtagttgatgccacttgaaaaccttcacacacagctccagtttaaaacctcggggctggagtcttttttcacaaagatctgaaacagtcttgagttctgcattctgtgtattctaagcacagttatgtgaagatttttcatgtgttcgtgtttcactgaaaactttatgtgaactcacagtgtccagactaattcagcaacacaatgtaaataggctccaaaattaattaacagtgcatatatttgaaaacaagattgtaatatattttaagattttgttcattctttattcagtttatttcatattatttcttctaattatcaactattacaaaacataagaaacgtaagaaaattattggtcaaagggtgttcatgcttattccaagaattgtatgcatttcctatatcactgtaagtctatatgtaactatatgtacatgttatataatatttaatttatttaacatttactataggatagataactattttaggaggctagaaatgagaatcacatatatcatttagtatacaaagtatattacacacaattttttctatgtagatacatagttgatattttacataatgtatatactgttatatactttaaacataactataatataaaatataaataaatgtgtacagctgcaataagtttaatttatagattaaagaaaaacagcatgttttactaatctgccaaggatcccacaccaagtgtcagcccaataaaatataagttgatttcaacaatttttagtaaggtgttcaaacatttattcttttattgttaatgaagtttgtgttgtgattcccacagtagccaaaccaaaaaaccaagttaggacataataaaaaataacagctttgtgtaacaatggttgctaaagcattcgtggatcaccttcctagtaaaacagaggaagggccatgaaggacgagcagtgaccatagagtagtggaaggcaccggaagcagtgaacgccccaggacctcggcagcgcccctccctgggtctgctactctctcatatcagacgatcctcagcatctcagtcttggttcaggagcagctcgcgtcgtctgtttagctgtggtgctgtggatcgcacgagcgtgacatacgcattcagaaacacaatgtagtgtagacggcagcggtaagaaaggaaatcacttagagctgtgccacgggggtgtcccatggattcccagttggtttcgttccgtggtaagatgtaggggttggatttcaatcctctccatgagatacttgatttccccagcaccatggccgagacatccctttccccgttgtgtgacttttagtgactgtaagaactggctggcggcagatgcgtaggttctgaatctcggttccaccagcctccgagtccgtcctggtgccgtggctctgtgatgcatcttgcagtgtggtatgggaagcctccagctctctgctgtgcgttcagtgtggccttggctctttgagatccccgagctttcgggtggatattgggggaatccacagatggatttgaatctatagaataatttataaattacagacattttatcagtagtctgttggtccatggatatggagagttttcatttttgtttttcatgtcagtttctttgattattgatttgtaactttaactgtagagcttttacttctagggttaggttcatccctgaatgttttatctgtagcttttgtgagttttatatcattgagttactactaattcttgtatgtgagctctgcgttctgccacaccattgaattaatacttactaatgctgttttggtggaatcctcaggttttgtgtacaaaaatcatgtacgcacaaaatcagtcacacgaagtgtccattgaactcccttctttatttgtatggcttttgggttgtttcttgttaagatgttcggtttgaaatgtatggttggttctgcactgagtaacctggtggcaatgggcaactgaactcagagaaaatccttgcagcttctctccattcacattaatgccatctaggggttgtacttaattcatgctgtgttgaggggcttaatcatagagaagtgttaagtggtatcaagtgcttcttgtatatctgctgagatcatatggtcatatcgtttccatattttattgtcagtatacacatatgtgtattgatttccatatgttgaactatcttttaactctgagaatgcaaccaacttgaataatagtgaataaacttgagtccttgggatgaaaccagtgacttactagtgagtttgattccatgaaactttgttgagaatatttgtatccgtgttcatcagaaatattaatggtctataagttgttgttgttgttgtttgctgctgctgctgctgctgttgctgctccatacttgtctggttttggaagttggatagtgctagctaggttcttggaaagttttcactgttgataaattgcaaaaaatccaatgaaacgaaactaggcagttaaacatcactggtgagcctcctggctgtgggctcccggtgagggacttcattggtgattcaatcccattaccaccattgttcttcccagattctgtgtcctctggattttcctgtgtgttggcataagttcataggggtctctatgtttacctttctctggctgagaccgcaaggcttccttttccctttctgaccatacctacttgctttcccaattaacctgtctggaagcttatcctggttaagttcctgaagaacagttaatggttcgactaatcctttccagcacttatttctgcttaaatccttgttgtttccttccatagactacattaggcttaagttggttcctggttttctaagtactggacatcaccgggatatgtatttacttaagggttttgggagtcggtttgagttttggggttttattctttgtttcttcttgttgttgctgctgctgctgctattgtcttgtgggtttttggttggttggttttggttttggtttctttgcttgatgtccctgtttctgcacccacttcccgcccactcatgccccgtgaagatactcacagcctgtgtttatacctttggatgccccttgttacatatcacacgttttctctattgtgtttccattttcattagtgttgcgaaatttttgaatgctcccagctttcttcatgacccacttagttgttaaaaagaatcttcggtttctatgaatttttacaattttcagaatctttttgttgagtcatatgttattccattttgatcagaaagaatagagggtaccacttcagttattttcaatttgttgacttaacatggactattctagagaaagtttcatgttccgatgaaatgtctgtcctgcagctgttggataaagaatattctgtaggtgttatttaaactcatttatccctttcagagtttagctctggtgtttgctcatatctttatctggatgatcttgacagatgcaggatattgacatcttgtcgccatcactatattgaaggctgtctggccttccatatccaatgactttgttatataaaaacaaacagtattctgatgataagttcatatagattcagtcatactgccttgttaattggcttctttatttaataacgtgactttctttgtctccttgggtttatttttagatgtaaatgtagctggtcctgtctgtcttaagcttctgtttaaaacatccatcataaaccatcctttactctcggcctgtctgtgtacttaataatgaagtgagtttgtgtttgcttgactctggggactgatttaactggagagtgagagaaggaatgacacacagacatacacacaaaagctaggatcaggtggcctgagactctccatgtatttatagagattggaaggagggtttttaaagacagacagacaaggaagcagggttattatataaaactgtaaaactgaacaaggagttgatgtagctagtgttcataggagcagttcctgtaggggaacagttctcaaactgtttacatctggagagagaccgctatggtgaacatttgatgcgcattctgtcaacattcacattcagacccaaggaaagcttttccatccctgagcatctctagggctactcctgtaggactgagtccttgtcctcgctttgcccaaatcaaacaatacacatttacagagggcttctcttgctccctgcagtcttaggagacctgttattggaaattgttttactctcgtgtgtgtgtgtgtgtgtgtgtgtgtgtgtgtgtgtgtgtgtcttagactttatccttttttgctcgttcactgtgcttgctccattgttctgtagtgtatctcttcagtgaggtttcctattttacatgctttcatgatggtgattacatttctttcacttcagaacgtaggaattcttatacctatttggaagccgtctatggtaatccgacaatttctcactggcagctgtcttggaaggccttggttccctggatggatattgtcatcatggaaagcattgctttctttcaagaatctgaatgtatcccttaatgctttcctggcctataaaatgtctgctcaagcattcagtgtcactctgatacggttcctttgtgtgactttgatctttccagtggaagatttaaagttgtttctttgtgttctatagtttggacagtttaattgtaataagttccgtgatgatcttttctggtcatgttgattgggatgctgcatttgtcctctacccaaatgtttgtaactgttctaaggtcatgaaatcctctgctgttattcctaggttatcaatgagcttttttgcccctgatgaaatttttctcgttgccttcggttattccaaaacgtcagtttgggcttttccgttttggttttgtttccgtgtttgtttctcatttactagcatgccagagatcttgagtgctttatgtttgtgttgggggcacaaacaggatgcttcccaagacacatctgtgagcccatgcctctgcccctcgatgcggtgagctgcagacctttccattctgaactcctcatgtctaaactgtgcttggttcgttctcctttggagtctcactttacgtttcttatccttgttgcccacactgacttcctcatttcactcacctggtgcttgcttgcttgcttgctggcttgcttgcttgctttatttatttattttgagctctaatttttttcctactcattctttttaaattattttgttttgtcaagcattttatctgtgtctctttctagcttttcctagaggcaacatgctacctttttttgtttctcaaatttttgtgctcctgttttgaaacttgcacctctggctaattagttattcctgcttttatgtggtagtcttattagaggtggggcctttgagattaccccatccccagtgcctttcagctcgtgttgtatttatacaggtcataagtattggagattttatgggtacagctttccttttatatataaaagacactgtctcacagcaggtgtcctggtcctctccctcttacaatctttctatgctcatcttcctcaataaatgttccctgaaccttaggcatttgtttgatatatacagcgctggttttgcatctagctggtcaccaactctcctttcttagattcttatgcatttgggattagtgagtttgggcactgtatatgtattgtcaaaatcaggtataccggttctctgtgcatcccacaggaacggagactcactagccctttgccaggtaaggtgggatgggcagcagacagtgtgaggagctcactgcataaatactcctgaaattgaaacagtggtccttgctgtggcttgaggtgggggtggaatcaacacaggccctgtgggtgttaattctacttaattaattaagttaattcagtagatgttgtgctttttgtgcagcttgaagggactgagtttggattcccagaatgcgtttgaagccaggtatattagaaggcatctatagtctcagccacctacagtgaactgggagtaagaaacagagaatctccagagtcttgtaggccatccagcctgacgtatgcagcggaacaagagacgctgcctgaacaaggtggaaagcaaggactgatccacagttgtcttatgaccatcacatgtgggtcatggcaagtgtggacccactctcgctctcacacacaaatatagacacatctacacgtactgctgcccacatataaaagaatgaattaccttcagggtcctgcaccataagccagtctcctgctgatgcttttttttccctctgtttgcattttcttggacaaaaatgcctacatcagaatctaaagtgtttgcttgagcaaaaccacattgaatttgctcaacctgttgactgacagagtcagaccatctgcgggttttgtttcccttttccttggtataaatgaagtgcagcagattaacttggaaaaccagggaggaggaaaccctacactgaatttcgtggagtagctcctccaccagagcatgagcaggacagaggtcatttggggactattctgcacttttaaaattttgtcattgggatgcttatccctctggtaggaacctctcaactccatccttcttcctccttcttctttctccttctcctccttctcttcctcctcctcttcttcttcctccttcttccaggagctacagtcagtgccacagttgagaaagatataatatgtgactaatccaatcttgtcacttttattctgaacttcaactgttattgcactagttttttttgttttttggtttgtttgtttgtttgttttaaagcaactcttttctggcctaaaaagtaaaatatggaatcagaaattaagtattagttttcagtcaaactactacattctccccctagatcctaatttttaaaatgaaataacattttccattctgcaataagtaactaacaaataaaaagagttggagagaaaatgaacaatagtatttaacataaaataatgacgtaacaatattgtcttctatagtgttcatttttatctcactgtttcactggtatctgtctttgacaatctccacagatggttcgcaagcaccagctagaccccccaaaccacgaccccgaaggactgcaccagaaattcatcacagaaagccccatgggcccgaagcggcgttggaaaatgtcgatgcaaaaattgcaaaactcatgggagaggggtatgcctttgaagaggtgaagagagccttagagattgcccagaataacgtggaagtggccaggagcatacttcgagaatttgccttcccccctcctgtctccccacgtctgaatctatagcagccagaactgcagacaccaaagggcagttaacaaatattccaggagtatgagacagaaggactgagagggaatgcaggagccacggtgtctttccgtgtggcttccccagaaggcagcctggagtccagcttctctggttccacagctctcttaggatgcccacactgaagcttctgtgtttgtgctagccatactttgaaatcagggttgaactgataaaataatttaaagacgtttactcccccttgaactttgaatctgtgaaatgcttttccttgtttacacgttggcagaattgcagtttgtctctgtttttgatccctgtactgtgttcctgacaggccctttgcagagttgctcaggtctgctgtaagtttctccatgcctgccctggtgcccacatcagaggctaaaccatctctttgttttgctctctatccgggccccacctcatgtccccagccaggtccaattccatttctcccattcacacggcacgctagtctgaaggtcctgatttttcagtgtttcaaactaatgcagaaagaaaaaggaaaatgtgtgtggtcttgtcttcactactgagtcttttctttgggaaccatcactgttgagaggtgggggaaaacctgaatgtaaaaagcatttatttgtcaataaactgccttttgtaaggggtttttatatactataaaagagcttctcttgttagtttaagttctgtgacctttaggttcccgaactctccctctcatccacccaggagtgtcataatgctgtaaaagtgactgctgcagatgcagggaaaacaggcttgcaggagactgcttgtactccagtaccataatgagatgccctgatattaatgcctgcatcactttcaggagagatggaaaaggggaccaccgcctggaaatatgttaatatgcctttagataaggtcatggacatacatgcctttcccaagtggaatagagcccattttctattttatgatgtcaccctggctcctcacagtgtgggagccccctaaggcactgacgactgttatgtatcactgcaactgcaggccttgtaagttgcaaaactcttagtaccctttctccactcatggtaggagtcctgtttactctgtgggttttgttgttgactgctctgtgttgcccccatccaggcagatgaaactgtggttacttctaatctatggatatcttttgaccatctgtaatgtgcgttgcactcttgtgggctttgaaagcacaaactctcacacatggactccatcatattatttgtgtagatgcgtttggtggtaaatgtctccagtctgatggatgaagcttccaagattggtgtaaggactttagacctctgtggcaatttcaggtttttgggttgggttgggttaggttgggttggggtttttgtttctttggttttttgtttttgttttgttttgtatccctaatagtggggggaaaagaataaaaactatctctgtgcaagaatgcttgaaccacattttgatagtttctaaacattgattttaggcttgtgtggatgtttcttaccactcgttactccacacctagtctcacatacagagatgcctcggataatcacttatcctgacaaatgacaagatagtaagtacatcagacagatccgatggagctgccattgtacaagactcatggacaaagctgtgtttgtccaggaagggaacccagcacattcttttacagtttggcttttatggaatgagacaggatttgaggactcttagtctgcatattttaggtttgtttggatggtcttatgttgcttctgctaccagaggtgtatttttttttttaatgttttcatatcctatacctgggaggaggtatgaatacaagtttttttttatactttctacaattggctatttgttgttttcttatctgctcttactttctgtacttgttttataagttctgatgtcatactgatacagtgctgtgtctgttgggcttcatgtagcttgccagcaatcagcatagcctaatacctagagttgcccctttgttgtccttacactgttaaaacatccttaaaggaggagggggtaggtttacaagaggaaccctgggacccacagcatattcacctccactctcagaaagtacaagagattttcctccagaatttaaaagctaaggatgtgctgacacagttttttggaacctgaagtttcggcagggtagggaagtgtaaataattttctggattgtaccaagatccctactgcagccactcagtagccactgttggttttctcatcaaggaaagtgaatcttaggagtcatatgtaagacaaagcaaagagaaaatgggaaaactcacaaaatttatttgaaaaaaaaatgttgaaattatttttcattttgaaagggactactagttaatagttgctaactaacacaatgttccacactttgttccctctgatccagaaattgaggtgcccccccatgctcaagatctgataatagaattaccctcaatccaatatcttatatagtctgcacaattaaaacaaaccatggctaattgtaacccctacctgggatccatctccaatgatattccagtcattgtttttctagaaatggggagttatttttttccttttccttttatcctccccaccccccaccctgcacctgacttcttggtatctgatatatatcacagccaaattttctggacacaaatactggcattttgatgcttaacttatcatggtcccacaattccagtagatagcccttttccacgttctccctccctacagtacaacagagccctggctacaaccttcagaagtctgtttgctaactcagtatttcacacacccaggacacatgcagagctcttcataatgtgaacttcctaattgttcagttccagaagcatttcctgcagtttgaacgtgactttgcctctcggattttcaacttgaagccttagtttgcactgaattgtctcatctggttttaaaatgtctcaaatggactgatttggaatcaaaatgtggtatattttaaatattgatgcaggtactttctgtaagcctgaaatgttgagcttcgaaggagactttctggaaaaagacagcaatagaaagttttcttctcagttcctatttttattgttttgaaatgcagtttttacgacttgtctaatgtggcaaaatagctatgtgttcaattaatttatattttattcttttttcatttctggatatgtaacaaacctcaagtactttatctgttcttttaaggtattttataaaatgaatgttaacaaa

1. A modified immune effector cell comprising a gene-regulating system capable of reducing expression and/or function of at least two endogenous target genes selected from SOCS1, PTPN2, and ZC3H12A, wherein the reduced expression and/or function of the at least two endogenous target genes enhances an effector function of the immune effector cell.

2-5. (canceled)

6. The modified immune effector cell of claim 1, wherein the gene-regulating system comprises (i) a nucleic acid molecule; (ii) an enzymatic protein; or (iii) a nucleic acid molecule and an enzymatic protein.

7-9. (canceled)

10. The modified immune effector cell of claim 6, wherein the gene-regulating system comprises a nucleic acid molecule and an enzymatic protein, wherein the nucleic acid molecule is a guide RNA (gRNA) molecule and the enzymatic protein is a Cas protein or Cas ortholog.

11-15. (canceled)

16. The modified immune effector cell of claim 10, wherein the at least two endogenous genes are SOCS1 and PTPN2, and wherein the gene-regulating system comprises at least one SOCS1-targeting gRNA molecule comprising a targeting domain sequence complementary to a nucleic acid sequence defined by any one of the set of genome coordinates shown in Tables 3 and 4 and at least one PTPN2-targeting gRNA molecule comprising a targeting domain sequence complementary to a nucleic acid sequence defined by any one of the set of genome coordinates shown in Tables 5 and 6.

17. The modified immune effector cell of claim 10, wherein the at least two endogenous genes are SOCS1 and PTPN2, and wherein the gene-regulating system comprises at least one SOCS1-targeting gRNA molecule comprising a targeting domain sequence that binds to a nucleic acid sequence defined by any one of the set of genome coordinates shown in Tables 3 and 4 and at least one PTPN2-targeting gRNA molecule comprising a targeting domain sequence that binds to a nucleic acid sequence defined by any one of the set of genome coordinates shown in Tables 5 and 6.

18. The modified immune effector cell of claim 10, wherein the at least two endogenous genes are SOCS1 and PTPN2, and wherein the gene-regulating system comprises at least one SOCS1-targeting gRNA molecule comprising a targeting domain sequence that binds to a target DNA sequence selected from the group consisting of SEQ ID NOs: 7-151 and at least one PTPN2-targeting gRNA molecule comprising a targeting domain sequence that binds to a target DNA sequence selected from the group consisting of SEQ ID NOs: 185-207.

19. The modified immune effector cell of claim 10, wherein the at least two endogenous genes are SOCS1 and PTPN2, and wherein the gene-regulating system comprises at least one SOCS1-targeting gRNA molecule comprising a targeting domain sequence encoded by a nucleic acid sequence selected from the group consisting of SEQ ID NOs: 7-151 and at least one PTPN2-targeting gRNA molecule comprising a targeting domain sequence encoded by a nucleic acid sequence selected from the group consisting of SEQ ID NOs: 185-207.

20. The modified immune effector cell of claim 10, wherein the at least two endogenous genes are SOCS1 and ZC3H12A, and wherein the gene-regulating system comprises at least one SOCS1-targeting gRNA molecule comprising a targeting domain sequence complementary to a nucleic acid sequence defined by any one of the set of genome coordinates shown in Tables 3 and 4, and at least one ZC3H12A-targeting gRNA molecule comprising a targeting domain sequence complementary to a nucleic acid sequence defined by any one of the set of genome coordinates shown in Tables 7 and 8.

21. The modified immune effector cell of claim 10, wherein the at least two endogenous genes are SOCS1 and ZC3H12A, and wherein the gene-regulating system comprises at least one SOCS1-targeting gRNA molecule comprising a targeting domain sequence that binds to a nucleic acid sequence defined by any one of the set of genome coordinates shown in Tables 3 and 4 and at least one ZC3H12A-targeting gRNA molecule comprising a targeting domain sequence that binds to a nucleic acid sequence defined by any one of the set of genome coordinates shown in Tables 7 and 8.

22. The modified immune effector cell of claim 10, wherein the at least two endogenous genes are SOCS1 and ZC3H12A, and wherein the gene-regulating system comprises at least one SOCS1-targeting gRNA molecule comprising a targeting domain sequence that binds to a target DNA sequence selected from the group consisting of SEQ ID NOs: 7-151 and at least one ZC3H12A-targeting gRNA molecule comprising a targeting domain sequence that binds to a target DNA sequence selected from the group consisting of SEQ ID NOs: 208-230, SEQ ID NOs: 376-812, or SEQ ID NOs: 376-575.

23. The modified immune effector cell of claim 10, wherein the at least two endogenous genes are SOCS1 and ZC3H12A, and wherein the gene-regulating system comprises at least one SOCS1-targeting gRNA molecule comprising a targeting domain sequence encoded by a nucleic acid sequence selected from the group consisting of SEQ ID NOs: 7-151 and at least one ZC3H12A-targeting gRNA molecule comprising a targeting domain sequence encoded by a nucleic acid sequence selected from the group consisting of SEQ ID NOs: 208-230, SEQ ID NOs: 376-812, or SEQ ID NOs: 376-575.

24. The modified immune effector cell of claim 10, wherein the at least two endogenous genes are PTPN2 and ZC3H12A, and wherein the gene-regulating system comprises at least one PTPN2-targeting gRNA molecule comprising a targeting domain sequence complementary to a nucleic acid sequence defined by any one of the set of genome coordinates shown in Tables 5 and 6 and at least one ZC3H12A-targeting gRNA molecule comprising a targeting domain sequence complementary to a nucleic acid sequence defined by any one of the set of genome coordinates shown in Tables 7 and 8.

25-44. (canceled)

45. A modified immune effector cell, comprising reduced expression and/or function of at least two endogenous genes selected from SOCS1, PTPN2, and ZC3H12A, wherein the reduced expression and/or function of the at least two endogenous genes enhances an effector function of the immune effector cell.

46-58. (canceled)

59. A modified immune effector cell, comprising one or more exogenous polynucleotides encoding at least two nucleic acid inhibitors of at least two endogenous target genes selected from SOCS1, PTPN2, and ZC3H12A.

60-83. (canceled)

84. A gene-regulating system capable of reducing expression of at least two endogenous target genes in a cell selected from SOCS1, PTPN2, and ZC3H12A, comprising (i) a nucleic acid molecule; (ii) an enzymatic protein; or (iii) a nucleic acid molecule and an enzymatic protein.

85-138. (canceled)

139. A composition comprising a plurality of gRNA molecules, wherein the plurality of gRNA molecules comprises at least one gRNA molecule targeting a first target gene and at least one gRNA molecule targeting a second target gene, wherein the first and second target gene are selected from SOCS1, PTPN2, and ZC3H12A.

140-160. (canceled)

161. A polynucleotide molecule encoding a plurality of gRNA molecules, wherein the plurality of gRNA molecules comprises at least one gRNA molecule targeting a first target gene and at least one gRNA molecule targeting a second target gene, wherein the first and second target gene are selected from SOCS1, PTPN2, and ZC3H12A.

162-176. (canceled)

177. A polynucleotide molecule encoding a plurality of siRNA or shRNA molecules, wherein the plurality of siRNA or shRNA molecules comprises at least one siRNA or shRNA molecule targeting a first target gene and at least one siRNA or shRNA molecule targeting a second target gene, wherein the first and second target gene are selected from SOCS1, PTPN2, and ZC3H12A.

178-186. (canceled)

187. A polynucleotide molecule encoding at least one TALEN, zinc finger, or meganuclease protein targeting a first target gene and at least one TALEN, zinc finger, or meganuclease protein targeting a second target gene, wherein the first and second target gene are selected from SOCS1, PTPN2, and ZC3H12A.

188-197. (canceled)

198. A kit comprising the polynucleotide of claim 161.

199. A method of producing a modified immune effector cell comprising introducing the gene-regulating system of claim 84.

200-210. (canceled)

211. A method of treating a disease or disorder in a subject in need thereof comprising administering to the subject an effective amount of the modified immune effector cells of claim 1.

212-224. (canceled)

225. A method of killing a cancerous cell comprising exposing the cancerous cell to the modified immune effector cell of claim 1, wherein exposure to the modified immune effector cell results in increased killing of the cancerous cells compared to exposure to an immune effector cell that has not been modified.

226. (canceled)

227. A method of enhancing one or more effector functions of an immune effector cell comprising introducing a gene-regulating system into the immune effector cell, wherein the gene-regulating system is capable of reducing the expression and/or function of at least two endogenous target genes selected from SOCS1, PTPN2, and ZC3H12A.

228-240. (canceled)

241. A kit comprising the polynucleotide molecule of claim 177.
